United States Patent Application Publication US 2022/0031776 A1 - sequence listing, part 9

SEQ ID NO: 286 - DNA, 5036250 bp, Klebsiella pneumoniae (residues 1-1,678,750 of 5,036,250)
  modified_base (1574679)..(1574680): a, c, t, g, unknown or other
  modified_base (2310703)..(2310706): a, c, t, g, unknown or other
  modified_base (2442940)..(2442990): a, c, t, g, unknown or other
  modified_base (2446776)..(2446851): a, c, t, g, unknown or other
  modified_base (2536439)..(2536458): a, c, t, g, unknown or other
  modified_base (2536910)..(2536911): a, c, t, g, unknown or other
  modified_base (3046635)..(3046636): a, c, t, g, unknown or other
  modified_base (3047105)..(3047200): a, c, t, g, unknown or other
  modified_base (3047482)..(3047497): a, c, t, g, unknown or other
  modified_base (3805884)..(3805906): a, c, t, g, unknown or other
catcacgcgtacattcagcctcgcgcccggcggaagatttttctgtctatctggaactgcatatcgagcaggggccgaggctggaacaggccggttcggcacttggtgtggtcgaggcgatcaacggcgcgcggcgcctcaattgctgttttaccggcgaggcgggtcatgccggcacggtgccgatggaccagcgccgcgacgcgcttgccgccgccgcggagtggatgctgtgtattgagaacacaacgcgccagcagggaggtaacctggttgccaccgtcgggacattgcgctgctcgccagcggcggtcaacgtcattcccggcgaagtcgcgttgactctggatatccgcggtccacaggatcaaccgctggatgcattactggagtcattgctggcggcagccgctgagattgccgggcgtcgcggcctgcagtttgccgctgatgagttctatcgcatagcggcaaccgcctgcgatccgcgattacaggcggtgattgccgaagcgctatgcgaggtacagggcacggcgttgacgctgccaagcggtgccggacatgatgcgattgctatcgcggagcgctggccggtggggatgctctttgtgcgctgcaaagggggaattagtcaccatccggcggaatcggtcagcgaagccgatgtcgaactggcgatcgatgcctttagccgggcggtgataaaacttgccgggtaaagcactaacgggcgcatcctcttttcggggatgcgccgcagacttatcacgcacctgcaggagaagctattttccgtagtcggctggcgctaacggccaccgacaacgccgaggccgcggcggcaatccacagcgcaagatgaacggcgctttcgtcttttgccaacagtacgcccatcacggcggcccccagacactgcccgaacgtgcgcatgatggctaaaacgcccgaggcatagctcgcctgttcgcgactcacgtttgacagcatttcccgattattcgggctctggaagcagccaaagccaataccgcataccaggctccgcaggcagatatcccacgcggcgggcgtagcgggcagcatcgccagcaggattaaacccgtgacaaaaatcatcaatcccagcgtcgagatgagcggcgcggagatcgagtccgcccaacggccggcgtgcggtgcgatcagcactatccctaatggccacggagtaaacagcagcgccgagaccattggactatagccatactcgttctggaacaggaacggcagcgcaataaaagtgatcccctggcttacgaaggcgatcagcgacgtaaaggccgaaagggtaaagcgttcatttttaaatatcgcaggcggcagcagcgggttgtccgtacgccggatgcgccagataaaggcggtgccgcttatcgccgcgagcaacgtccagtacagactatcgatatgctgcgaagcgctctgcaagctattcgccgccatgatcgttgaacccaatagcagtgccgacaatatcgctccgggagtatcgaaagcggcttgcccgccaactgtcggccgcggtagcgctctgaccgccagcagtagggcgacggtaccggggagcacgtttatcgcaaacagccattgccagctcaaggtatgcaggatcgtgccgcccagcaccggcccgatggcggagcttgaagcgatcagcagggcgtgtatcccgagaatacgccccagcagtcgtccgggaaaaacggagcgcaatatggcgggcgcgatactgagcgttgccgcaccgccgatcccctgcagtacccgcatgccaatgagcagctcaggcgtcgtcgccagcgcgcaacctgctgatgccagaataaatgccgtcagtccggtcaaaaacaccgggcggtagccgaaacgcgctgccagagcggcgaatatcgccagcgtcatcgccgccgccagcagatacccgttggcgaaccagacggcggtactgtctgaggcatgtagttcctgcgccatcgacggcagggcaatgtttaccatggtgccatcaaagacgcccattaaggtggtggtcattaccgcggccatgacccgcgctcgcgccgggcctggcagcccgtcatcaccaggttggctggaaaaaagtgtcatcgtgttgtctcctgcagaagatatctggatgacgaaactataaagttggcttttaccgggcggaaggcgcaccatttacactctatagttgcatgaaacgccttatctgaatgttccaggagttgtggtcatgtcagaccccgattttaatttattgattgcactcgatgtattactgaacgaagccagcgtggcgggcgcggcacgtcgtttgaatctcagtacgtcagccatgagccgcacgctaagccggttacgcgatgtcaccggggatcagatattggttcgcgccgggcgtaatatggtgctgacgccgtgggcggaggcgacccgcgatcgcgcccgtcgcgcggtcttcgaggcgaaggcggtgctgcagccagcggcggaagcgctcaacgtgcaaaatctggagcgtctttttaccatcagggcaaacgatggttttgtggtggcgtttggccctccgctgattgcggcagtagccgaagccgcgcccaatgtctgtctacgcttcgcgcctaagcccgaaaaaacgtcacgctatctacgggaagggctggtcgatcttgagattggcgtccagagcaatatggggcctgaaatacgactgcaacggctgtttgaagatcggtttgtgggggtggtgcgaaaggagcacccgctggccgccctgagagagataaccgtggcggattatgtcgcctggggtcatgtggtggcctcaccagaaggtacactacacgggtccgtcgatgatgtgctggccgaactcggcatgaaacgcaaaatcgccagcgtcgtccccggatttccgaccgcgctttccgtggcgctgcaatcggatcttatcgccatgatccccgctctctatttagtcaatcagcaggtcatggagcaggtgcatctttttgagctgccgtttaaaagccggcggattaccgtctcgcaaatgtggcacccgagaatggaacgcgatcctgctcaccgctggctcagagagaaaatagtggcgatatgccgcgtggacaagtcgttacaccagaagctgtagaagattattcgcattgagtttcttcagggcgttacatttataggtcgagacctgtttttcactcatcttcgtcatatgcgcgacatatcttaccgactgccccttaaccagcctgtcgaggacgttaaattccatctcggtcaggcagcagcgcagggtgcggatccgccttggctctttagataacaaccaggcggcatccgccacggagatccggtcatcgatgatatgcaacgttaaggtttcaaaacgcttgcgcagataggtggccagcccccagcttttttcattacacaccagatagccagttcctcgccagccatgggcttccagggtaagcaaaatatcaaccagcgactgatgcgtgccagtgatagagaaacggcagcgaataaccagcgtcgtgctctctaacagtaagggctgccactgcaccgtgccgctatgcacttccatcataacgttacgacggaggagggcgtagcgcagcccctccgcataaaagcgattattatcaagaacaacgtaactcacagtggcctctttataacgtactggggtatagataacgcgtaacgtaccggtatagtcacccgcgtttttgctgctggcggcaaaggcgggcgttttcagggtaatgggggccgggatgcataacacgctttcgcggccgcccggcaggacaacctggcgcaaatagcggcgattgttggtgccctcccaggtcaacgttttaccgttagcggcaacttcagttgcgccggtggtcgggttggtcaccagcacctgataatcgagacgatctcttgggtccgtctggctgcctccccgtcggcggatggaaaaggccccttcggcacgcccggtcgcgtcaagcccatcgtcttcgaagcgtagaaatgcccgcgagctggtgctgttattgccatcatagaggcacatatccagcgagttttcgcccttaatctcactgccgccgggtctgcccgggaaattggtgaggttaaggttcaccaccggcgtggagtgcggaaatgccggtaaataaatctgctggttgcccgggtcaaccacctcaatacgcaggttagcctgccagttagcaagggtgaggtagcctgggcagccaatattgacgtcattaaagttgccgccacagtcggcggtgccccattcgcgcaaatcttgcctcagcgttgccgtccagataccggcctgatcgagtttgtttaattcgctacggacgatgtaaaaatcaaaatagggcgcactgttccaggctggcaaatctagtgtaccgcccgttacgtagctggcgaaaacaaaggttttgttattgatgaacatataatgttcaccataaatttttacgtctaccgtcttgttggttattgcgtgggtaaaacgcaggtttatcggatagggcgcggccgggttaccgctaaaccataccggcgcagtcatgcaggcgccataggttgtatcggtacgcgacttgcaggtcagggtatttcgtccccatttttgcggatcgctgggatcataaccgccggactcgtgtagccagatatccaggcgggcaggaggagactggcgatcgaaggcgaacgccacgctggtatttctgccggcaggactgccggcctgagcttcggcaaaacagatgcaggcaagcagtaaaatcaaaagacgcgttatcacatcattttcctgtagagagtgtagagttattcatcgccgttgggctgaccgccggcgtacggccagccagcagcagttgcgcctgctgctgcacggtttccggtaacgcggaataagtcagttcttcgcaggtcaccgtgccgacatagcgcacgacgtctcgcatggtcttcaccttcagcgcgcactggtaaaactgctgttgtttcaccatgtagagcgactggatcaggctgtcgctttccgcgctaaagccgccattacctaaatcgctccagccgctgacgttaagcggcatgccgccgataaacggcgtatgttgttcatcggtcaactggccaagccaggtataacgcgtggtggtttgcacctctctgtgcagcatttttccaggcaccataaataccgttctgcttcccgaccctgcgtaatttcactgttggcgccgtgggaaatgtccgtcgactcattaatagtcagcgtggtttgctgatagccgggcagggcgaacagcgcgcgggcgtttgccgggatatcggcgctaccgctgttatcaagcgaaacggcaatgcgggaatcaggagacgcttccggcgttgcgacgttgaccgcaatggctgacgctggccgtccgtcaccccaacggccaaaccacaggccagaacgagatagcgctagcgtagagctgtagttaccgctgctgctgaaccggtggcgatgatcctggcgatcccacgaatcgctgacggtcaaacttccgttaccaaatcggccgccctgacgggtataggccgaggtattcagcgagtcgctgttaattccggatgcgttaagaccatattcgttttcaccgcgcgcatcggtgtaccagttgtgcgcgacgttatagttgagctgatttttttcatgcttctgctgttgccacgtggcccccacggaagtgtagctggaggcatcgccctgacggttatgtgccagcgacaggcttacgctgaggaagccgcctttatccttgccatcaccagaatggtcgttacgcataaacaggtttatgctgctgttgatattcaacccgcgggtgctgaacgcgttgctgagtccggcctgccacgcctgcgaacgggagcgggtcatatacaccgattcccagggcaaaccgtcgtcgcgccgatcgtcactattcggtaattcacgccgcgagacataacggccttcattgcggttatcggaataaccgaggttggcataccacgagccgaccggaacggagaacatcaccgagagacttcggtagcaaccattcaccgcgtcaaaccctgtactgctggagtcacagttatcagccgataaggcgttacgatagaagctcagtgaaaagccatcgttatagctgatttgctggatattgccgcgttggccctggctgccataaaggtagctaaagcgtgtgctgagcacgccatcaatggggccggtattgaatccgcggctccagtcgacggcactttccacaaaacgttggttttttttcaccgttgcgccgctggtgaccgccagcgttgaagttacaggcaggcgaatacccgcttgcaccacggcgctgcgttcgtcgctcatatcgtcgttatcggtttcaccggcctgcataaaccactcgacgcggtcgaatggcgtgatgccggtgcgggtaaacggaacctgctcggtacgggtcaggcggttgttttcataaatcgccagcgtcacggtatagctcccgtccggaaacgaacgggtatccagggtttgcgccccggcattaagataaaaactggccagcagctgattgcctcggcgcgcatcgatacgcgcgtcatgggaaagcagcacggtaatgggcgttccgctggactgctgcacggggttgatccacgctcgcgtcgagccggtacgcagaccacgaatttttccaagcggcagttggctgaggttgatattgccgccggccgcgctgaagagatcgcgcgtatccatttcacctaactgaacgtaatattcatgccacagatcctgacggaaccaggcgttattcaccgtgatctcctgctgttgttgatggcgggagcgctgtccaagccaggtccagtcgaggttaaaatacccattttcagtcatagctagcgcgccgtttccctgcacggtcatcgactgatagttttcatcggccacgaagttgatattttgctggtggatcagcgcgttctcagtattacgcgtaggctgataccactgattttccgccgtttgtttgggtagataccgcctgtcgaaaaacaggttaatacgggcgttattctcgtcataaatcagggccacgcttttggtgtcgatgaaatcgcaacccggcgcggaaccgttgctgctgcaggcgagattgccgttacgcgcaagcggagaggaaagggcgccggtcacagaggcgatcaaggcaggatcatcgttgaactgacgcttaattgccgcgatgagcgtttccggcgccacaaaggttaccgtttcaagcgtgatatcggcttcaaacaggccaagcgaagcgccatacagactgacttctgtccacaggcgctgcgttttcgccagatcttcaaaacccgcaggtacgacgatagtggcgctggctaattgaacggaagcaggtaacaaaacgacaaaaagaagagcatttctgtgaaaagccatgaacgagcctcgacgtcatcctgacatcagagggcagacgccctctgatgtacttccttatacgtattgtggggttacgcgccgccttccgcggtggtcgcctgagtcagcatcagactcaccacgccgctgtactggccagttttcagaatgccttttgtggtctgagagatggtcagcggcaggaccgcagaaccgttttcaacgctgcccgggaacagctcgctgccggtaaattctgcatcggtagtgttcagggttttatcgcccagttttacggtcatcggtaccgtctcggcgccatcggcattggtcagattcgctgcactaaccagacggactttgacgttgctggtggctgagttcgaccaaattttggtattgagacggtagctttccagcccacggcccggcagatattgcatatcgatgctggcaggtaacggcgtattatcggcctgggtcatatccaactgggaatctacgttggcattaaccgtaatatccttctgaatagccattgcgctgaacgcagtagacatcgcagcaacgatcatcagaggtttaatatacttcttcattgatatctccatatttataaacgagctccattagctctttaaacaaaccacatgtggttttgacagtgatgtcgtgttattgcacgacgggcaagtctgcttcttcagctgttttattaatccagttgaaatagcggaatttatatttttggccacgaacctgagtaagtacttttagttttcgctcggtgtccgggtaaatagtcgcatcttctttaaaccatcgacatttatcattaacatcgcaagcaccaatttctttcagcggtacccgcaaagagccgtcattttttaaagttcctgctgcgggatttattcgcagagaaaccaccggcttttccggcgccaaatgaaccaatgctccccagataacgtttacgccgagtttggccgaagccggcgttcccgcggatggtgcaggcaaaatgctatccggctgttttacaccttcaaaataaacgcgccacgtactctctttttcaggaggcgtcagagataccagcctcacgatacgtaaagcgcctgccgctaaggcgaatttttcaggggtgacgacaacgcctccgtctttccacgcggccatctcaacttctttttcctgtggcgtacccggattaagaattttcttttgcctcacccgaatgaactgaatatcatcgcttttagaggcaactctgatttgggccgtcccggaactgtcgacgttaagttccatcgggtaaacgctcatattagcctgtgtcatttctgcgaaaaatgacatcgacagggcagcgagataaagcgcagtggacttgtttactctgttttttactttcacattcattctgcctgctctgagttcatgtacggcgtttttacaccacgataccgtctgctttcgtatcgcttcaggacagggaaactttaaccggaacagcaggttgtgaaaatttgtattagttaactcaaaaaatacagttctttatcctgcaatccaggctttaaagttgtatagttaaaagaaaatgccgcaacccaggatggggagaaaattcctactgatgaaaaataagctaattcagaagggggttcttgcctgcagttacagggattaaaagcaagcggcaacagccgagaatgaaatatgttttttatatgcaacaattcgttgttatttgatcctgaagctcacacattaagtattgttggacagcctgagtccgtattaacgctttcggcacccgccgtgcgtctgttacaggaatttattcgtcataaaggaagcgaacttagccgtgaggagttgattacccgcgtgtggcaggaattcggtttcacgccttcgggaaataatctcaacaaagctataagtgagttacgcaaaagcttccaggcgttgggagaacatcatgaattgattgtgaccataccacgctatggtttccggtttgaggcggatgttatttttcaaccggcgcaaaacgattacgcaagcgaacctcaaccccagatacaaaacgctgaaaagaggaagcaacgaccacgtctgaaatggtggctggtattcacggcattattagcgtcggcattcggtattggtataattattcgccaacaacagaatataacgacgccgataaagctaaagctggttgagcaaaaaatcgctaaatgtagtatctggcttattaacgatcatgggcgaccgctggtattatcgaaactcgccgcgttgctggataaaaacaacgtagcgtgccagcgtgaggagtacagcgtctattatttcagcgctcgtttttccctggtcgctgcggatgaagtgtttattggcgcatgcccggtcaataaagacagcctttgtaaaaccattcgctataaaagtggggctgagaaatgaaaattaaacttattggcggcctcagcttttttctattaggtggcgcactgacgctttattattgttctgccgcgagtggtaaacgggatgtactggcctgcagtaccctatttaattttacgcgcaatgaaggcaaggccagtgaagtgcgggttaatactgttgctcagttctattttcaccgtgacggctctggtctgaccgcctataaaggggcagcctgggcaaatggccagagcatgatcgttgacagagatgtcgattttatctggtcgcggcgggatgatgataaagtggtggtattgagctacaccaaaacctggcgcaggcacaatgacaacacgccggatgagcaatggggaagcttcgccaatccaaccgcccgttactatcttaccatctccgaggttgcgccttcggtgtggctgatacaggacaggcattatcccacttatatatgtcggggtgattaacgcataaacaaaggagaataccggtggtattctccttttacgcttagagaatctgccgacaagggaagggcaagaataagggaaagcgagagcgttagcagaaggatccagcccggattttagaacatgccgttgccgctggcggttttttgcggaacgttttgggtaacatcccaatgttcaacgattttgtgctgttcgttgaggcggaagatatccacgatagcccgcgtaacgccaggctcacgaccggtcacttcaacgtggagaatcacgttatttccgtcgacaaacgcctgcttaatttcactatgcgagtcgggatatttactcttcagaaaagcgataaactgctggaagccttccacgccatcttttgccatcgggttatgctgtacatagcgatccccgagatatggcctggcggcggagaagtctttatcgttcaaagctttattataaaaatcaatgacattctttttattcaacagttcgctttcactatagcccgcaaaaacggcgggcgtcagagcgaaaaacaatgaaagggcaacgatagattttttcagcatagatcctcctgcgatggttttgatgtcaggcacaggtctgtcaggtgaatgaaccggccactcagcgacttttcagacagtaactcacagttatgaactcagttttggttcataactgtgttaaacgctgtccataaatcactcgatgttacgcctgttggttcatgaactgttcgttataatttgtgatgtgcgtcaggttttagtgttcagtaatattaccttttactcgatgatcgattgtttagcacctctccgacaaccggagcagcggtaaatgcgtttggccagccagcatagaaggcggcctgggtaacgatctcaccagcctcctcagctgaaagtccattatccatcgccctgttaaggtgatagccaatctgcgcactctgtccggatgcgattaacgcgctgaccgtaatcaggcttctgtcgcggggtttcagcgcgggtctttgccagagatccaggaacaggggttagcagtaaatttaaccagtcctggagatattgggccaacatttttttccactgtctctgaacgctgcttttctgcttcctgattgagaggaagcaggtccggagaagcgtcaggaagtgcatctgccgtgacgccacgagtttcaaatactgctttggtcacgctgacggctgacatggcatttgaccaacctgagtagaacgccagatgggtaatgatttctgacaattccgctggcgtaacgccattatcaagggcaatgcctatatagtgcttaaggtcgccaggctggtttctggcaattagcatggcgacggtcaccatactacgatccctgggcgagagggcatcgcgtgtccagagatcttcagtaatcacttctcgaccaaagcgcgcaagagccggtgagacagaccgaatatcagcttccgaaatcgctgaaggttcaattttcatcatcgctttacctcttgtttcctcagcggtagcaaaatcagaaataacaagcgacatggccgccgctgcaattacgcttttcatgttaatcctcactggtcaacggtgcggatcctgtttgattccgcctttgttacgaagaaataccggttttaccgggatagcgtctttactggcgctcatatgcgccgtttgcctgagatagtcacggaagtgtggcgtttgtcggtgcagttgaatgatcttctgggtttgatagcgtcaagatcggtcgcctgaaactctgcgatgtaataagcaggcgttgctgccagggctggcgcgagcccggagagtgtgaaaagagtggctaccactgttttaaaaatcatccttcctcctcataacctttcatgaaagagaataagggctaccgcgtccagacctgcctggcgtctttagtttgcggcgtgttttgcgccatgatccccgtcagaacgtgcggctggtaggtttcttccagaaaccggatttcctccgggctcagttgaagatttacggcgtttaccgcgccatcgacgtgatctttttttgtggcccctacgacaggtgacgtgacttttgtcagcagccaggcgagagatatttccgtcatggacacctgatgccgttcggcaagttcggctacacgctcaataatgagccgatcctgttcagccgtgttgtcatatttcccgcgcgcataatcatcctccgcggctcgccgcgtgtggccttcttttcgggagagacgaccgctggccagcgcactatagggggtcatggcgatatcatcttcagcgcacagaccgaagagctctcgttcatcttcacgcataatcaggttgtagtggctttgcacggaaacaaagggcgtcagcccttcgcgttcggcaagggcgttcgctttcgcaagctgccaggcatagcaattggaaataccaatagcgcgcactttgcccgcagtaacggcggcatgaagcgcttcaagcacctcaataactggcgtgttgtaatcccagatgtggtagatgtagaggtcgatgtagtccatccccagattctgtaggctctggtcgagcgatcgggctattgcctcttttccgccgatccccgcggcaatttgcgcggcggttcgcggcagaaacttggtggccagcaccacgtcctcgcgttttgccatctcccgcagcgcccggccaacgtatcgctcactggagccgttctgataggcgatggcggtatcgtaaaaattgatacccttttcgagaccgtagcggatgatgtccaggcttgctgtttcgtccagcgtccagcgatgctggcccgttaacgggtcgccaaaccccatacatcccatacagatgcgggagacaagcaagtcacttttaccgagccgggtatactgcattgttattctccctctggattattcacgacggaattgagcagatcgacaagccttgaagcgtgttcccgggcaagcgttttttgctgcgcgattttgtcggcatcccggtcggcatagctgataccgcaggtataaaccggcgccagcagctcaagattgcacagtcttgccgtggtctcgaacggaataagatactcttcgatggcatgcccaaagaaaccgtcagcggtatagagcgcctgtggcgcccctgtagtgaaggagaggatcagctttttaccgcccagcttcgccgttgagccatgcgcgaagccgtggacaaagacgtcgtccagccattgtttcattaacccgggcagcccataccaggaaaaaggaaactgccagacaatcacatcggccctgagcaggctttcctgctccgcagcaatactgaatttgccgtccggatagagccagtccagacgacgaatttcagcatcgggaagggcggtcgccacttcgtcaaggatagtggcgttggcgacggaatggttcagctcaggatgacctgaaataacaaggatatttttcatttcaataagttaaagagactggttgaaaatttaaaccagtatagagtgacaccattattttttttagagcagtaaaggctcattcacttttagaaaaaaactaataatggtcgactgttctcattgtgcccggtcatcatgaacccatgaactacgccgtgatgcccagtaaacgttctgcattgcgaaacgcgatggcctctttttcagccttattgacgggcagactgtcgataaatgtttttacaccgtccagggtctgataggggtaatcaacggagaacaggatcctgtctgcccccattaacgcgtagataaactggaagtgcggcagtgtcagcatacctgacggggtaatgtaaacgtgttcctggaaggttctcgttagcgttcgtgacagacccgttgcagccagcggaaggctgtcatcaagacgctgcagccagaagggcagcatctccccccagtggccactgattacctgcaggtggggatatttatcaaatgcgcccgataacatcagccgtaacaaatggatcccggcttcgtgatgccagccccagccaaacatagagagcctggcgttgacctctgcgctgaagcccgtgaagtaggcctgttgcacgcttttaaacggtaatccgggatgaaggtagagtggcacattcagtttattaaagcgggaaagcagggagtcatagtcaggatgatcgagaaagcatgaagagggtcggccattcagaagagcccctttaaaccccagtttttcaactgcgcggacaagctcattttcggcctctttcggctgcgcccaaggaagtgtggcaaatgccgcgaagcgatccgggtggtttcttaccgccccggcaaggcggtcgtttgccgccgtatttaatattaccgcttcatcctcgggtgccagctgggggaatccgcccacagagaggatctgcagggtaattccagcctcatccatatccctgaggcggcggcttcccaaatcagcgcctttcacgtttatcagcgcattcttttctatctgcgggcggcttcggtccggattatgaccatcagcgacggttttcccccagtcaccaaggaaaggcgcctgctcaagcgcaaaaggcatacacgctcgccctaactcgctgtcgagataatgttcttcgaggcaaatgattttcatattctcacccttcatacaaagcagtaaaagtgatgcagattaggagcgcccggaacagcccgttcgtgattgtcattcatgacagtctgtcccggatggggtttacaccatcggtttttcccaggcgcctcgtgtatccactctggtctctgtggcgagttgttcaagcaggatgatttcctcatcgcgtaactggatgtctgaagagcaggcggcgtccagaacgtgatggactttagtcgcaccaacgaggggaaggatacctttcgcaatagcccatgcgatggctatctgtgcaacgctggcattcctttcggctcccatttttttcatggcggcggttaatctttctatctgcggcagtactgcgttataactttcggcccggccactcccggcaggcatgggatgatttgaatcataacgaccactgagcgcgccttgctccaggaccatgtaagcaaagaacgtgatgttattttgtcggcaataatcaaggattccggcctcttcagaagcgcgatagagcaggctgtagtgattctgtactgcactgagggaataaccggaagcgttaaggatttcgttggcgcgtctgatttgtgccagattgtggttggaaaccccgacacgtttgaccttgccgctttgtaaaagtgggatcagtcctggcgtccatttctcgacgtcgaggggattatggatccagtagatatcaatcgcgtccacgcccaggcgtccaaggctggcctcaagcatatcgctgacaggctgtgctgactgttcgttcgcaatctgcggcgtgaatttggtggataaaatcatatcctcgcgggaaaactgacggactaatgctcccagcgctgcctcggagctccccatgccatacactgctgcggtatcccagagattgaggcccttactcatggccgtggtgaacacgtctgccatctgagtatcagaaagatgattgccgaagacggtgtcgccaccggcaaagcctgtgccccaggaccatgtgcccagcgcgacggaaggtagtgttttcatattcagctcctgtaaaaaggccggaacgttgctgacttaaaccggccaaagagggtgagtaatggtgaaagatagatgaatggattaagtgggctggtggagcgcatttaatagcgccacacccacaccgtgagctgaagcgggattctgccctgtgataaggcgaccgtcggtaacgacgttttcagaccagttcggggcttcatgatgaagcgcgccatgctcgcggagggcagtctcaagcaggaagggaaccacatctgtggtgtgaacttcttcctcttccttgttggtaaaggccgccacgtttttgcctttcaccaggtattcgccgctactgagctttgcgtctaccagtgccgcaggcccgtggcagacggctgagacaatcccatcactttcatacacttcgcggataatacgctgggcatcctggctatcacggaaatcccacatggttccatggccgcctgcaaagaaaacggcgctgtaatcggtaccgttcagctcggataacgcaggcgttgttgccaggcgctgctgaaaatcggtttcgttccagtacaaggcgttgacagggtcactgaggtcaaaaccatccaccggcggctggcccccgcgaatgctggctatcgtcgtttttagtccggcatcttccagtactttcagcggatgcgtcagctcagccagaaaaaaaccggtcgggacgccggatgcgcctttaatcggatggctggagacgacacacagcacgggtttatctgcagagttcatatcgggcctcactctttatttttaaattcagcggcgaagagattttcccagttaataaaggagccaagcggaatgcactcgaagcttaataagcctgctttagccagcgggaactcggccattacgttcattgcttcatcgacagagtcacattcaagaaatatagcgacgccaggtctgtcctgacggaagtagatgtcgcggatgaacccggatttatacaatccccaggcgtgcagcgcttcagcgttaaggtgtggagcatatttttccagcgatgctccaggtgcggggatatccagacataaaattcgcatcatagtctcctgaactcaggtcgttgtagaaagagataaaagtataagaggcgaatttcacgaagattagaggggcattgacttaagcatctttaggctgtacttaataattaagcagtgattgcttaaggaacacattatgaataacgccctgtataaccagatacggatctttcagagcattgcacgtgagggcaatatttcggcagccgcaagaaaactggaaattacgcctccctccgtcagcaatgcacttaagcttctggaagagcatattggccatccgctttttgtgcgtacgacccgccgtattgagctgacggaaaccgggcagatgttgctggaacagaccgctgcggcggtggagtcgctggagaattcgcttgaaagcattcgcgaccagaatcaagagccctctggtatcgtgcgaatcacgctctcgcgttttgcctatctgttaattctcaagcctgccatggcggaattctgtcagcaatacccgggtgtacaactggaaatttcggtttacgacggtaccgtgaatatcattgaagagcgttttgatcttgggattcgttttggcgatatcctcgagggtggggtggtggcacggccgttaatgaaaccctttcgtgaagggttatatgcatcctcagcctatctcagcgagcatggaacgcctgaggtgccgtcagacctcagtcaacataagctgattggctaccgttttattactaacaaccgcatccttccgttgatcctgaacgaccgcggagagcagttgacggttgagatgcccgggcagttaatcagcaacgatattgacgttatggcagacgggatccgtaacgggctgggaattggacgcctgtttgaacccatctggcagttacagcccgacagggagcactttatccccgtgatggagagttactggaaaacctacccgccagtctatctctattaccccaaaaacgcgggtaaaacgaaaagagtgaaggccctgattgattttctgatatccgctacggggcgataaagacgataacgcatcgtcccgtttggaagcgctatttcacaaccccagcggcctggcctcctgtatgaactcaatcagaaggcgaagcccggtcggcagttgccggcggcttgaataatagatataaaaaccttcctccagcggggaccattccgtaagcaccaggcggagcagtccatccttcacatagggtgcaacaagaggctccggaaaatacatcaggccagccccgcctaatacggccacaagacccgtttcagcctggttgaccgtcattgagccaggcacagtgatttggtacgtttcgccgtctcgctcaagttcccagcgataaatccgatcgtcgccgagacgattgcttatacagcgatggtgtaacaaatcatccggatgttcaggcgttccgtaacgttccaggtagtcggggatgctgcgataacccagcgaatatcggcagataaacggcgggcaaccatgtcttccgggacggtgccaccatagcggatacccgcatcgaagcccgcatcagtgacgtcaaccatacggttgctggccacaatatcaatttcaatatcgggatagcgatccataaacgcaggcatgaccggcgcaagcaaaagattggccgcttcaacggcagcattgatgcggatacgtccggtaggggtattacgataccggttaagcgattcaagcgcgccttctatcttgtcgaaaggctgaaggacagactgaaccagttcttcacctgcagccgtaggggtaacgctcttggtcgtacgattaagcaggcgaaccccgagccgggtttccagtcccttcagagcatgactaagcgctgatgcactgacacctaattcaatcgccgcacggctgaaactgcgatgacgtgcaatagccatgaaataaatgagatcggcgacatcagctctgcttatttgcatacagaatagttttccttgtgcgttaaggcccgaatgcgttgatacggaaatgatatacacattagaccgaccagggctaatccgttgctgaatttttttcacaagtccatccactcatcgcctctcactgaacacgttgtgcttcgttattcttgaaaattatgcgctctggccgtcggtcagggcggaacattcacttaacggagccgtgtatgaactatacgcatcttggccgcaccggcctgagagtcagccgcctttgtctcggaaccatgaattttggtgacgtcaccgacgagaaaaccagtgcccgcattctggatgaagcgcttgagacgggtataaatttcattgatacagcagatgtgtatggcactgaacaatcacccgatatccagcaaggttcggggctgtctgaagaaattattggtcgctggctccagcagggtggccgccgtgaccgtatcgttctggcgacgaaagcctatcagccaatgggaccgggtccgaacgatcgccgtctttctgcttaccatattcgcaaagcctgcgaggacagtttgcgacggcttaagaccgaccatattgacgtctatcagatgcatcacatcgatcgctgtacgccatgggaagagatctggcaggccatggaactccttgttcagcagggaaaagtcctttatatcggtagcagcaatttcgcgggctgggacattgcgactgcacagtcagttgccacggcccgtcattccctgggcctggttgctgagcaaagtctctacaatctgactgcccgaactattgagctggaggtcattcccgcatgccgtcattttgggctgggactgattccctggagcccacttgccggagggttgcttggcggcgtactgaaaaagatggcaagcgggcgccgtgccaggcccgagttttcccgtcttatcgaacagtatcgtccgcagttggaagcctacgaaggattatgtgaggacctcggtgaaacaccttccgatgtggcgcttgcgtggctcctgcagaatcctgtcgttactgctccacttatcgggccacgtacggtcgaacaactccgggaggcgcttcacgcaacgacaatcacgctatcagacgacaccatgagttgcctcgacgaaatctggcccggacccgggggagaagcgccccaggcttatgcctggtaatgatcaaattaatgaatcctttcttcgctatagggagttccagtttatgagcaagatgatgcatgaccagcattctgcttctgtacccgcttcccgggatcgtcgtaattttctgatcgccggcgccggtctggcgttggccgctaccacccttggcaggagcggagcagtgatggctaaaccggctggtcaggacacgtcgaatgacccttcggatgctgttcccgtccagaaggagaccttaaccacgcgtaaactcggctcgctggaggtttcaagcatggggctggggtgtctgcccatggtggggtattacggcggtggtccgcgcgatcgtaaagccatggtttcgctcatccgggcagccttcgaacaaggcatcacgttctttgatactgccgaggtgtatggcccccatctcagtgaagaatttgtcggggaagcactggcccccgttcgcgatcgtgtggtgattgcgactaagttcggtttcggcgtggaggaggggaagcctacctccctaaacagccatcctgaccatattcgccgcgccgtagagggctcgctaaagcgtctaaaaaccgaccacatcgatcttctttatcagcatcgccccgatccgaatgtgccgattgaggatgtggcggaaaccgtgaaggcgttgattcaggagggtaaagtgaaacactggggactgtcggaagcgagtgccagaacaatccgccgcgcacatgcggtactccctgtgactgcagtgcagagtgagtatgccatgtggtggcgtgaaccggagacgcggatatttccaacgctcgaagagctgggtatcggtttcgtaccttactgcccgaccgcccgcagtttccttgccggggcagtcaatccagatcagcggttcgacagcacagatcggcggcataatctgccacgcttccagcccgatgcactggccaaaaacatggtactgcttgaattcgcgcagtcgtgggcccgccgcaaaaacaccactccggttcagttcgcgctggcctgggtgatggcacagcggccatggatagtccccatcccgggtacgacgcaatatccgcacctgatagaaaatagtggtgcaccgcaagtccggttgacggacagcgaattaagcgaaatcgatgcagcgcttgccaggatcccattgcagggcggtcgcgcagatccgtttaccgaaagtcagtttgataaaagttaaacggtgatggccacctttatacttactgtcacagggagactgtagataatgtctccctctgtgttattgtcagggataaaccacatgaatggactaaatcataacgcgcttagggcattaacagtcctgtattgctgaaggcggcgtgagtgaaggtggcgtatccggaagtggggggatgatcccgtcgacggggtgcggcagatagtgtgcctcgagttccatgatttcggcatcgctaagagaaaagtccagcgcgctgatagccgtggaaagatgttctggtttcgtcgcgccgatgatcggtgccgtgatgaccgtttttgatagcaaccaggcaattgcaacatgggctcttggcacatcgtgcttttcagcaatgctggcaacaacatcaataacgggcttatccagcagggctgcgttctcatacatttttaacgcaaaggcatcgttttgcgttcgtcgggacgtgacactccagtctcgcgtgagcctgccccgcgccatcggactccaggggatcacaccaacgccctggtcttcacacaggggcaacatctcgcgctcttcttcccggtaaagcaggttgtattgcggttgcatcgtaataaatcgggtccagccgttacgctctgcagtatgctgcatttttgcaaagcgccaggcttccatagatgatgcgccgatgtaacgtacttttcctgatttaacgaggtcatgcagagcctccatggtctcttcaacaggcgttgagtggtcaaagcggtgaatctgaaagagatccacataatccatacctaagcgcatcaggctgtcgtcaatagactgaaaaatggccttgcgggaaagaaacccggtattgggtgagttgcgccacggaaagaaggtctttgtcgccacaacgatctcatcgcgtctggccatttctctcagcgcttttccagtgatctcttcagaacttccgcccgagtaaatattcgcggtatcaaaaaaattaatgcccgcttcaagcgcctggcgaatgagcggacgtgacgccttttcatccagcgaccagggttgaggcaagcgttcaggttcaccatagctcatacaaccgagacaaagacgggagacttgcaaaccgctacgacccagattcacatacttcattctgtgttccttcttttattgccagcaattctgtatgtgacagggtattgcactgacatgaagggaaccagcatgcgccatcgaatggtgttatgagtttttttcacagatgggcgtaatcgtcagtggattttacatacaaggacagcgcccacacactgacatcattaattattgttgggtgaggttttcgggcacgcctgaccaacaggaataacaattttttcacggtgttccccgcgttcataaacgcagattgtaccttcatctgtattgacctgttccttcagcgggagctctggttcctgcgcaaaaatgcgaaaggatgcgaccaaaatcaatgccagagaacacaaaagctggactgcattcatatcttcactcctgaaaaatatttaactcatttccagcaccgactggcgaggcgtaagcttaccaattatcggtggcagttccgtttcgcgaagcggacgaccctcaacgatgcttttaatgcgctgtacgcactggtgcaggaggggttccattggccaggaaatacaggtcagttgcggatataactgcgtggccaacggtgaatcctcaagactgaggagggatacctcctgaggcacggcaatattaaattcgcggaagaggcgcatggcctccgcagcgtaagcatcacgcttaactacgatggaagagaacttgctcagactattaataagcgtcaacagcgcgcgttcgacactctcattggctgttaataccaactggcgattaaacggaaatgagtagttctgcaacacattgcgataaccttcaaccattcgcttgcttgcgtcatccgtctcgttatcgataaccagcgcgatgttgcgatggcctttacctatcatgtagcggcaggcgctctccgtagcaaaggcgaaatcgtagccctgacttttcgcgtccactacgggtcggtcgaaagaaatcacgttatcgccactgcccggtacaactggtccgaacaccacaacggcggcacattgccgttgtaaatcatctaccgaagctgcatgttcgacgtcattatccacatactggacgatcagcgttttgttcagcactttcattgcgcgcgcaagcgcgggaagaatacgtgcgccactgctttcctcacgtgaggaaagcaccacaccgatatggcttgatgactgactcgccaggttttgcgcggcgaagcttgggcggtagttgagttcttctacagcccgtaataccgcctcacggctctcttcgcgaacacccctggtccccgtcagcacgcgggaaaccgttgctctggaaacattggctaatcgagatacatcatcaatcgttggcatagcgttttctgcgtggtgagttttcatcatcttaacataaccctcccgaagaatcgtcccgtcgccggtcatgacgcttatgtttcgttcgcgttcagccggggaagccaggctgcgccacgtacgccgctggcgtcgccaaagcgcgccggaacaatgcgcgtatagcaggtttcagaaaagagataagaaataatagcgacaggcagatcctcgtagattctgctgacattcgacaatcctcctcctaacacaatgacctggggatccagaatattgatgactgacgccaggctacgggcaaatgcatcaataaaatgccgccagtgttcgcgcgccttcggatctccctgttctgcggcgttgataatttcctgagaggtcaggtttcccgggaaacgacgggcaaaaccggtaccggaaataaaggattcaatacagttatgcttgccgcagtagcagggctgagcggggccatcaatcgctggtgcgtaccccggaagcgggttgtgcccccattcgccggcaatggcgtttggaccttgtaacaaatgccggcgcacggcgatcccaccgccacaccccgtaccgataatcacaccaaatacggtgtcagcctttgcacctgcgccatctaccgcttcagagagagtaaaacaatcagcgtcattggcaatccacactggctgccggatacgtgcggcaagatcggctttcagatcgtgaccattaagaaccaggcaattgcaatttttgatgagccccgtttgcgggtcaattgcgccaggcagaccgacccctacggtgaagggttccgggctagccgcgcgggcatcatcaataaggctcaccagatgcagcataaattcagcgtaactttctttctgagtcggctggcgcttacgccagagataatcgccctgagctgaaagcaatacagcttccatttttgtgccaccgatatccagtccaagataatgcatacaatcctctgtcataagagaggccgcggcctctctgctgtcgttatgcctggtgcgggcgtgtgcggtaaatgtgaataagttcggtcaccagctccctggccagaatggaggtcatcaggtggtcctgcgcatgcaccatcaccagcgtcattttggttttcccttcgccttcatcagcttcaatgagctgggtttgaacaaggtgcgcttcgcgggcaaaatgagtcgcctctttcattagttgatctgcggcttcaaaatcaccttgctttgcgcagccgagggcttcataacacaggctgcgcgactgacccgcgttaatgatgatgcccataacttgttcttctaattccatgtttttttcctctatgttctactttcaggcggattgagctgcatcttctgcatgttcaaccgcgttttcatgctcttgttccagaagctgtttttcgtaggccttcaggaaggggaagtacatgacggcagatgtcaccatgcatatcaggcacaggatcacagggctgaagctccagttggctgcccatgatgcgccaatgggtgcaggtgttgtccatggcgtcatcgataccacacggctgactaaatcaagatccagtgcaaaccatgcgaaggtggcattgaccatcgggaccagcacaaacggcaggaaaaacagaggattcataataatgggcgcaccaaacagaatgggttcgttaatgttaaacacccctggtaccacgcccattcgcccaatagtccgcaaatggatggctttgctgcgcagcaaaaggaaggccagcggcagcgtcgagccaacaccaccaattagcaggtaatggtcccagaaaccctgaacgtaaatatgcgggatagcttcacccgcggcgattgccgcctggtttacggacaggtttgccatccagaaagggttcataataccggtgacgatcagcgcaccatggataccggcaaaccagagcacctggcacaccagcaccgagaggagcactgctgggagtgtatcggacgcggcaaccagcggtttcaccagcgacataattgcttcgggaataatcatccccagttgcgcttcaataagcaggttcagcggatgcagcgtgatgacgattgccagtaccgggatgaggatctcaaacgagcgcgctacgccggttgggacctccggcggcaggcggatggtaatattatgtcgcttcaggaaggcgtaaagttccgtggagtaaatagccaccagaatggcggtaaagatcccctgaccggagaagtaggccgttgaaatctgcccgtccttcaatggcgcagcgacaagcaaaaaggccattaaagagagcatcccggcggtaagtgcgtcgagatcgtggtgtttggccagacttgcggcaatcccgacggaaataaagatcgtcataattcccatgctgaagttaaagggcagcatgagggcatcacgatgatcaagcgagaattgcagccatgccctggcgaaggcccaggacgtgtcgggcgagaaggggggaagataaataccagcataaaagaacccacaatcatgaacggcagagcggtaatgaagccgtcacgaatggaggtgacatatttttgctggccgacggcgcccgccatcggagtaattttcttttcgataacctgaattagttttgcgtacagagagctcatagggtttcccttcgttatttgttatctatcagggagagggcgaaatcgagaacggcgccccctttttgcatgccgtaatccatcatgttgattggctcaacgcggatcccgtatttatcggcttgtttctgtagatcgctttgcatgtacttcacctgtggtccaagcaataccacctggtagtgaccaacctgctcggcaaattcggcaacgccatacgccttgatttccgcttccaggccacgcttgtgcgcttcatcgaccattttttttaccagcaggctggtagacatcccggcagaacaacacaacatgatttttttcataacgtctcctttgaatttatggctggaatatagtcaccacggaacaaaacggaaagcgctttccgtttgcggataaggtaattgtgaccacgatcacttgagagcacctttcactttgtatgaatgtgcgcgatcatctctgctattcaagaactactaaggtcgacttatgaacattcatttgatgaatgttgctgtggatttgatagagcaacgcctcacgccggtggcgaatataatcactaaaaatcaacacattacagcaatgcgagacggcttttctcttgcaatgccttttgtcatcgtgggaagtctgatggtgccaatgctgtttccaccgttcgccatttcaagcacctcacgattcggatctttttatctgctgctgcgtccgatgctgttaccaacctttgagctgacgctcggcctggtggcgttgattgttgcatttggtgcaagtgccagccttgccaagcaatatcaattaccggaacggttatgcgggctcaccggatgtctcgcctttctgctgtttatcggctttcgggataatggcgcgacgaatgtttttctgggagggatggggctatttaccgccctcatttcaagtgcatattcgattgaaattataaggtttttttataataaagggtggtgcattcgtttgccggatgaggtgccggtgatgacacggaatggtttccagctgctgatgccgctgctggtgattatgctttccatcagcgtgatgaatgccgtgatgctgcagacgaccggacagattttgccgcaactgattggggaagcattgcgcccactcattgtagcgtcagatactctcacggctgtgcttatctccttgtttctgtgtaatcttttatggttcgtcggtattcacggcgcgctgatcattacggggatcatgaacccgttctggctcacctatctgtttgaaaatcagcgagccctggccgctggagaggctgtgttgccccatatttatctgcaggggttctgggatttttatctgttgattggcggaatcggctcaacgctgccactggtgtttatggcaatgcgaagccgctcaaggcaattgaagagtgtggggaaaattggtcttttgccttcactatttaatattaatgaaccgatattgtttggttttcccgtcatcatgaatccggtttttttactgccctttgtttttgttcctctgataaatgcctgtatagcctggtatttgacgcaaatgggtatcctcgacagggccgttgcaatgctgccatggtcaatgccctcaccgctgggtgctgcatggtcggccaacggtagctggaagaatatgtgcatgtgcctgtttgcctttttcaacgcatggatgctttatcgtccattctttaaggtccacgaacgtcagctgatgcagctggaaaaataactcttctcttcctgtttctgcccatttctcgtgggcagaagcttaattagtgatattcatcacaaaaacattctcaaagatctcaaatttgtgattcaatccggcaaacacggaaagcgatttccgttagtggatgtacatttccatttttgatccttacatttcccgtgcacgtttaaccgtgaaaataaaaattcaaagggaacctatgcaaacgttatttaaatcaatacctctgtccttgattaccctcactgtcatcagcggctatgccagcgccgatgagaaatatgattttgcgctccacggctatttgcgctcagggatcctcgccaacagcgatggaaaccgggtggattcagtggggctgatgcccgacgggaaatggcgtctggggaacgaagaagataccaagattgagcttatcccgacagtaacgctgaaatcggatactggcgcagttgctcgtgttcaggccaacctgacgcatcaaacaaaatgtaccgcagactggaactgtaccgacgatgacggtaaagaaacccagttccgcgaaggttttgctgagttatcaaatctcgattttgcaccggatatgactttctgggcgggtaaacgttacagcagctccaatctttccagtcaccagttcgactgggagtatattcagtataacggaaccgggggcgggtttgataacctggatttaggcttcgcgcgctttgacgccggcgtttatgcgttttcaacaacggatgaagccaaagcctatcccgtggctctgggggatcagggataccctgacgattactcgcttaacctctggtttaaaaaaatcggcggcaccgggctggatgttgagcttattggccaccatatgaaccgcaacgaaaaccatcccacttctgctgaaaaaggttatggcgtgacggcgctgtataacgtcgacagtttttatgggctgacaggtggctattcgcgcattgttttccagtacggcaaagggctcgctgccgctgactcactgggtaaaaacggctggggttgggcaaatctggaagacacccagtcctggcgcgtgattctggatggcatggccagtctgggcgaagttgaagtgtcgacctttgcgttttatcagaaagacaaaaactaccgttggtggaccagcgatgatgacggctggggacgctccatgtgggtggcgggtatccggccgtatcatcagataacgaagaatttcgccatgcaatatgaagtgggttacgaatatctggatgataaaaactacatgggggtaaacggcaaaggaaaggggggcctgaccaaggtgaccatcgcgccaacgctcaccttcgattctggattctggagccgtccgcagctgcgcttctttgccacgtatgccaaatgggataaaggcgtctcggatgcgatagacagaaattacgactggagcaccggtacccttagcccgggggatactctcgcagcggggataccgatacgctgaattttggtgtacaggctgaagtctggttctgaggagataagagatggctttcccgattcgaaaacttctgatcgtctccttactgtccgcgctgggaagcgcgggggcgctggcggcggaacaatcccattttgaacattttattactcgtgatggtgctgcgttaaaagacggcgatcggctctttcgctttgccgggatccatgccccggagctacatcgtatagaggatgacgcgagagggacctgcaaagcggatccgcgcgggtgggggcaatatttcaaatggcctactgctgaagagcaagaaaactggattaaagccctggtgcaaacgggtgctaaagcacagcgcgtgtatgtgctatccgttcagcaggaaaacgacgcggcctgcggacgtgaaacgcatatcctgtcgccggaaactcctgacggcatgccgcggctgaatgaagcggcaatgaaagtttatgacaacatgattgctgaagcagataagcaggggcttcgcctgattctaccgtttatcgatcactggtggtggtggggtgggagagaacagcttgcctcattttatcatgaaaaacctgaggatttttatcggacggacagtaaaaccttccaggcttatcttgacgtgattcgtcaggtaataacccggactaacaccattacgggacgccactactacgatgaaaaggcgattatggcgtgggaaacgggtaatgaactggaggacactaacgctgattttctacatcagacatctgcatggatccgtaaatgggcaccccatcagcttgtcgtagatgggacttataaaaaggtgaatgatttcgcgctcagcgatccgaacgtcgacatcatcagcaatcactattacaccaatgccaacaacaaccaccccgggcaggttcgtaaagatcttgcggcaataggcggtaaaaaagtctatctggtcggcgaattcggtctgctcgatcaaaaagaccttaacgctatcatgcagtctattgtacatactgaagtcaacggcgtgcaggccgcgggcggctttatctggggttttcgcggtcatcggcatgatggcggtttttactggcacaaagagtataccgggcactatagctaccatctgcctggcttcccggatgaggggaaagcgaatcaggagatggaagttgtcaacctggtacggactgccgcggcacaaatggctggtctgagcaaggcgccagctctgccggtacctgaagcaccgaggttgcgcgagagcgattccccctttgccattaactggatggggtcacccgttgggcgttattacgacgtagaaagagcggcacagccacagggcccatggacacgcgtcggaaaggacatctccgacggcaaaaatgaatgggacccatcgaaaatgagtcttttccgcgataattatcgcagcctgacgcttggccagacttactactaccgggtaatcgctaagaatgaaagtggtcagtcagcaccttcaaacgtgattcgcctgaagcatacgcagaaaaaccttccaccggttatcaccctgcaggacatgctttccaccactgttgataaaggcgttcaactcaatgctgcctggcaggatgacaatctacctggcccgaaagtcagcgtagcgtggagccatgacggtaagaataacgttcacttctgtaacagcagtaaagaggaaacccgagtctggttctccgcgccgggcgactatacgttgacctttactgctgatgacgggttgctggaaagcagcaaaacgataaatgtcagcgtgaggcccgctgtgaggcctgtaccggcagattattgcagctttggcagcgggactatggatgttagcaagggaacacttaactccattaaaagtgaaaaagatacgttagccatcggagaagacggtttcctggggcctttcgcgcatgacggagacagcgtgagctggcaggttagcgctccctgggacggtaaatttaccctacacgtgaaatttaacggcaaatggggaagcaagaaaaactcgttcatcgtgaacgacggaacgccagtcagcattgaatttccgcaaacggatgagaagggcaagaccatagtcgttcctgtttcgctcagagagggggctaataccatcagttttggaaagtttaccggcgactggggatatatgttcatcaaatcaattgaagttactgcagagtaattatttggctgcccttttggggcagctttttaacattcaggaggcattatgaatcggtatcaatttccggaaggttttttttggggggctgcagcatcaggcccgcagacagaaggcttcgcgaataagccgcaccgttctatctgggatagctggtatgcagaacaaccaaaccgctttttccagcagattggtccgcagaaagtatgtgaaacctacagcaagtataaagaggacgttgcgctgatgaagcaaacgggatttaactcgtttcgtacttccattcagtggtcacggctgattgatgattttgaaaccggtaccccaaacgcagaagctgtccggttttacaacaactacttcgatgagatgatcgccagcggcattgaaccaatgattaatctttatcatttcgacatgccggaaatattgcaaaagcagtatggcggttttgaatcaccccatgtgacggatcttttcgcaaggtttgcccgcacggcatttgagctatttggtcataaggtcaaatactggatcacctttaatgagccgatagtacctgtcgaaggcggctatctttatgatttccattatccttgcaaaaaagatggcaagctggcggcgcaggttgcatttaacattatgctggcgcatgcaaaagcggtgcacctgtaccggaaacttgagctaccgggcgaaataggcgtggtgcttaatctgactccctcgtatacccgaaacaatagcgacgaggataaaaaagcagcgtggtatgccgacctgttctttaatcgcagtttccttgatccgctggttaagcatgaattcccgaaggagttatgtgaagtcctcgcaacccatgattgcttgccagaaataaaaaaagcggatgtcgatctgataacgagttcgcgggtagatttcctgggggttaactactatgttccacgtcgggttaaagcgcgcgaatgtccctatgaacttgattacttcacgccagagtattacttcgagaactacagcgatcccgaagggcgcttcaatccgtatcgcgataataacgagatttttccgcaggcgatttacgatatagcctgcaacatccgcgataattacgacaatatgaagtggtatctggctgaaatcggtatcgccatggatatccagtcagaaggtcctgttctggctgatggggttattgatgacactttccgtatcgaattaatggaagaacacctcgaacagctccatcgcgccatcagcgagggggcgaactgctttggcgtacaccagtggacatttattgataactggtcgtggataaatagctttaaacgccgttacggtttctggcgactggatctggaaagcggggagcgacagataaagcgcaacgctctttggtttgcacagttggctgcctctaatggatttacgcccggagcgtttataaagggcaacaagtaatgctctcgttctatcgcatgatatttaggggaacggacggtggagacaatcatgtttaacggcgtgattttatattagaagaggaaaatagtccgcacggcatagactgagcgggctattagggagtcatccaactcgtgaatcacccataactaaaatcgagtagttgggaaactgtcgcggcagcgagtaatattcgcgctgccggcgccggatattgtcattgttatttcgtgaaagaggatcataacggacatcgtcaggacaggaccatagtaagtaagttaataatcgactgtatttaacataatatacattatgcgcaccgatgtagattgtggccgataacggcgtttgccgtgtggatttgctttggttattgctggcctacgcttgctccagactcgtactgacagccatctatcgttgttcttcctgtttcgattgacttccagcctcataattcctcactctgacatgtcgctttttttctcgtggcgtcggctgcactactggccaacggtaatcttcaattgtcagattaatcgcggacaacaacgtttgctgaccgcgcttaaaaaatcgttataaccgctcatcgttcgctatcgcttcagagcggcttcgcttcgtcttgcatgtcatcgcgatcagaacaccttaaatcgatattccatgatcacttccgacgacagcgtgtttgtacgtgtataatggccatccgtaaggactggcgtttttccttgcgtcttatatgaccatcccggcccgaacatcgcccaaaaggtgaagtttttaaaccaggactgcgttgggacccaacggctaaaggcgttgatttccccggtacgcacatgattacctttatagttaaattgcccgatgtttcccgccaggccaacggctaattcaggcgttaatcgatattcggtgatgttcgccagcaccagttccccatcacgcatgtaatcatcgccagcgtaggccatagaaataaatgttcccctggaatttttgctcatgtggcgtggataaaacccaatttcatctgcttttttagcatttgtgtagccaattcccaatttgctattccagcgttcacctttccaggtcgcgtccagcgcaaaatgccaggcattattatcaaaatcccgtttactcgcaggcatcgcgcggtaactttccatcgcgtgggtaccgtagacttgcgttccaatagttaactgcgaatccgcccgaaactgtgtaaacaacaggtgccgttgcaggtagtttttactctcaccataagcatactgtgcatcaaaatttttccctctccaaagaatttctccgcttgccaggtggctaatatattcaccggtattggtctggaatcgctttttatctggtgaatttctgtccatggaattttcaagccacgcccctcttatggtaaatgggccgtagcttaaagcactgctgacgccggaatacgttgttggagaaagacggttagacgttgaaataacgccataatttttcagcatctgccatccccagcgcgcatttaactgcactcccgaaagcgtgtagttaagcttcacattgcgttggccgaacttggaatacccttctgcgttgctttttttgttaccagtaccattattataaagcacgccgcgcgagttgaaatagtcgctggcacccaattttatcgcgctataatatgatgcgtcgaagccgataatatctgcaaaataaccagactggtattctgctgaaaatccttgcccccaggcgttatgtacatgtttaggattggcattttcctctttaagatatttccagtaattttttgcagagacggtgagctgtgagtcagtaaaaaaaggatcatcaaaaatagcgtctgtagccgcccatacaggcgtaaccagcccgcacgccattaacgcggaagttatgttcttaaacatttttatttcctgagaaaagatccgccatagcttgtttatggcggaaaaaacaaactgtaaattattagtggtttagtgacgctttacctgcttcaacatatttcatggtgccaatttctggcacactatatttaccatcgtgataagtgactttcaccactgcagcattcgacaatggcaggtttttggccgggtcgtccgtcaaatcggaaatcattatctgaatcgccgtacctgaagaaatggccagaatatttttatcaccctcttttttggcattatctacaatagtagccagcgcagcttgtgtccgtacttttacttgctcatagttttccgctagctgtttaggatcggatttggccagcgcgttctggctttcctttaccgagagcgtgcctgctttcatcgctttaaaaagcgctttaccgtccgtcattcctagttcgtgtgcaccagcattggccatgtcggaattataaccgccttcgaaaccaccaaaaaacgcctctcgcaggcccgtcatttctgttaaatgataatccgttactccagcctgtttaagaatcactgccatggtttcgcgctgccgtccggcatcgctggaataaaaacgctcgaatttgatccctttgagtccctccccaaatattgtgcaacctgcaccccatcctttgttagtggcgaatcagcccaaccttgcacgcggtcaaacgaattaagcagcgttttcccatgccgcgcgaaataaatattgatgacctcctcctggtcatttttaacattagtgttcgccatcagcagtggactggtaatggcagtaactgccattaagacacctagaaataattttttcattttaaatgaatcctttttcatagccaaaaaaaaaacctacgtactcttcagcaccctggtaatgaggtggagaagaaaacgtaggttttgcctgttgaaacagtaacaatccagctactgtcgaccctatcactaatgtttttgaattgcacctaatctataacaatgatttatgtaattgtgatcctcctcatatcaaccgtattcccatctggacgttaatatctgcagtacgtattttaaattcacttgggattgttactgtttcaggcaaaacctaaggccgtttctgtacatgttgcagaagcggccttaggtttttttttgcattttagttaccctcatgaataacaggagttacgatgaacaagtcatgtattgccgctgcgctgatctctgcattcgcctttaccgcaagcgccgcgccgctaaaaattttgattgtcaacgacgatggttgcgaatccccgggcagtattacgcttcaggaaaaactcacgcaaaaaggttttgaggtgtggatggttgctccagccaccaatcagagcggcatcggttcggccattacattcaaaacgggtaaaatttttgatgtaaagaaggctgctgataagcgctactgtttcccgggaacgcccgccgatgcggttgattttggcttacggggattactcattaataatccgccggacctggttatttctggcgtcaacgatggcccgaacaccggaatggcccaggtcaattctgggacggtaaatgcggcagccagggctgtacgttatggtttcccggcgattgcggccagcatcggatatatctttaccgaagatgaaatgaagaataaatggccaagcacccataaatactggcctgatgcggtggattatgtggttgatgttgttgaaacattgaatcataaacaagtttctggttcatctttattgcctacagggtcgggcttaagcattaactatccgccgctgccaaaatcaaaaattaaaggcgtgcactatgtcgaaaacgagatgttccctaccccacagattggttatgatattttgcctgatggacgcgctaaacaaaccatcaatccggaatcgttaaaaacagtagagaacgataccgattccggctggcttaataaaggttatatcacctatagcctctttgatggggcaatgaacgccccgcaattccaggcgcaatatgaagaactgctgaataaataattcaccagtttatttcacaactttctactatccacttcgttcctgccggcgatacactaaatcgctggcaggcgatgttttcaatttttcatcaccgcctaattatattgcttaagccctcatccgtactgtacgacgcgtaccgttccaatatcaggtaaatacttgattgagttcaaaagttagtctatttcggactattcctagttgtttatggtttttttaacatctaacctcatttttctataattccacaattcacgtagcgagcagctcatgaccttccctgcacattcttcaaatctgcccgactatgggtttgctcgtagcctgggactagcctctggtagtgattttgattttaccgcgctggccgcacaactggactgctcccgcgatttctctcaagccgggataatctattccgacggaatgaatcgctggcttgtgcgtccttcacgcagaatcgccacaccaaaccaaagtagcgttagccatgttatcgtgacagaaattgcatcctcgacgccgcacaatgccgcaaaagccacgattaaaacgctacaagcaccgtcactggctaatgaaattacctccacggctatagcctgcggcgctgccgtggtcactgtctttttagcgcttggagctggcgcggccatcccctcaccgccggagcctcaggcgtggtggcagcaatgatcactgcaggtggtgtggcgacaggtttacagtgttttatcggtagcggacgtctgttagctatcggtatcggccatgaggaggatattgcctggcttgacagccaggactggtataccgcaacctcaacagccttggatatcgtttctttagctggcgctggcgcgggtttaaaaagtaccattgcaacatataaattaatgaaagccagttcctcctccggggcgataagctggctcaaaagtctgagccgggccgaacgtaagcgtattacagaagaaatcatccgcgcccaaaatccaggaatttctaacggtggaattaaggcggccatgcaggcacagctttaccctaagcgtttcccgtctgaggcaatacagcgttctttgcagcgtgaattaacgaatgcggttattaatacctcagccttcgcggggagcgcgctcaccggaacaatacgccatccgcaaaatgtgacgcaatccggtaagtacgtcatcggcgttatacagtcgttctcattttagatagttaaagcactcggcataatgaaatatattaatgacagtctcaaactgggcaccatcgttgagcaaaggataaaggagcaggatcctaagcagttagagtccgcgaaaatgtacttgatggagcgtatgggaacgcctgtcgggttgcatactgctggcgtgccttttattttaagcgcgctgttaagcgtaattagttttgctatgccgcagctaacgctttggggagccatctttcagtggttttcctggcccgcgcatgctgtttttgctggtatcatccccacaggtttactctattgtctgctgatcttcccgtcgatgacgctgttctctcgaggttttctggcggcgcttaagttctatctaggtctgattttcctgaccgccgcgctcgccgcgggaaatctcatttacgcattcatttcggtattcatatttggtgggcatgtcggtttgcttataagcgctttggttggtgtattgtttagcgctgggagtatcaaactcattaacagcgctatgtttgtaaaaacctcagcattttatttacataatcgagtttggcgctggcaattaaaacatcatgcacaaaatgcgatatgataaaaatcctctgctggctcatgctgacgttgttaagctcgacggggcttggcgcctggtttcttcaacagcaatatgacgcgcgctccgccgatttccgcatcctgtatcgagaaatcacggtaaaggtgtcgcagcacgatgccatcatccccctgcttccggccggtcaaaatgccgccgaagtccagcagatcctgccgcagatcgtgcaatggcgtcgctacgattcccttgaaccgcgacgccctatcgtcgcgcaaagccccgcacgctactggctgaatcttccgggcatctccctgctgattgatttgaacaccctacttaacagtctcaatgagaaaaagacattcaaacatcttgccattctctgggacgataccacgttgtttgaggaaggtactgcctctgccaacacctggtggcgctgggagaaaaccgtcgccagcccgacacagccgctgctgattagcgcaggcgataacccgcagtggcatcaactgccgtggtggctgatactttcaccggcactgttctgggcggtgattatctatctcgttaatcagtatcggaccaataaacgccgacgggatatcgccgatctacgcacccgctatggcgaactcactcgtcttaataccatgggcgaactggccgccggcatcgtacatgagcttaatcaaccgttgacagccatcatgaactataaccaggcggcagtgcgcctgattaaaaaaaatgatcccgtgcggatccccgaactacttgaggcctcagtattgcagataaaacgcattgacgccctgctcagccagtttcgtctcaagctcactagtaagcgcgccgaatatcagccggtggaccttccgtccctgtggctacgcgtttgcgaattgctggataacgagatcggcgcagggaaagtccgcgtctccagccattttccgccggacctccccgcgcttcctgcgccgccgctgtgggtggagcaaattctgcataatatcgttagcaatgccattcaggcgcaaggcgcaaatgctcctggtagcgcatggattcatctgcaagccgagcgagtgaatgacggtattaccttaactattactgatggcggaccagggttatcgactgaagcgctggagcaggtatttatgccgttttatacaacccgtagcgacggcgttgggttgggcatggcccttgcggatacccttgtccagcgtcttaatggcacgatagaagcgagcaatatcaccggtaatggcgcctgcttccggttatggtttccgctgcgcaatgaggagaagtaatggagcagtacatctggttaattgatgacgatgcggcaatacgcgattcattaagtctactgctctcaaccgttggctggcagacgcaggcgtttgacagcgcacacgcttttcaacatcaggcagggaatctagccgaattaaccggctgtatgctgctggatatccgcatgccggggaaaaccgggttgacgctgctcgatgagtggcgccagctaggtctaaccttgccggttattattatgaccgggcacggtaatattgatttatgtcgtcgcgccttcaaaaatggcgcatttgaatttttaaccaaacccattgatgccgacctgttattcgaagtggtcggcgaagcgatggcgcagcaaaaagcgcatctcgaacgacaacaaatattactgccgctgcaggaaaaactcgccacccttaccgcccgtgagcatgaaatgctccagcagctgctccagggctactccagtaaagaaatcgcccgtttatgctcgctatcgccgcgtaccgtcgaagcgcatcgcgccaatatttttagcaaacttgaagttaactcgctgcccaaactgttgaagatttacgctgatatcgccagtggcgctaagtaaaaatacctggtatgttcggtatttgcggcaatggtcgctatgctccctcccttctagtattgctctatcgccactcaatacgacggagcatcaccatgaaacgtattcttcttagcaccatcctgcttggcagcctggtcaccaccgctagcgccgcaacgggcgttctcagccagaaaaatttgccagtggagctcgcggataaaatcgcgcaaagcacgctacaggcctgcgccaaagacggctataacgttgccgtcacgctggtcgaccgttccggtacaccgttattaatgaagagaatggataatgcgggcccgcacaccgtcgaagccagccgcatgaaagcattcaccgcgctaaccactaaaaatgccaccagcaatgtcatgaaaggttctcagtccaacgccggggccgcgaacctgcgtgatatacctggcttcctgctgttagctggcggagtgccggttaagatgggtgaccaggtcattggcgcggttggcgtcggcggcgcgccggggggaaattttgacgaggcctgcgctatggccgggttgcaatccgttgaaaatgagctgaacgccagttaactgggctcgccaggcatccaataaagtcgcggtattgatcatcgcggatcgccagaggttatccgcgatatattcatgtgttagagagcgcaaccccattaccatacttatatagtggttaatgatggaatgtgttatcattcacgcgatttataactcatcgcgacagaggtattgatgctggagaatgtaatcatctgataatcggtatgcccttttgtttccggggtggctgattacactgcgcttaaacatgtatgccacgctttgtattggtacgttttggtgcatgatgattacggaatgtaagcagcatgaatagcgtctcgcctccacgtctcccccagtaatctcattccaaaaacgttcaattgagccatggccgccaatccacaaccacatggtaataatattatgataaagattgatattgaacgaccacaagatatcccttggtccaacaggtcattattgaggcatttggctctgccgatgaagcgatgctggtaaaaaaactccgagaggactccggttggatcccgacgctttcactggttgccagagataatcaaggtacaatagtgggacatgccgtatgcacccgcgccagtgtggggttacacccagcggttacattagcccctgtgtcggtacatccggcctttcaggggatgggtattggcagcgcacttgtcactgcgactatcgaagccgcccgcgccgcaggcgagaaactcatgaccgtactggggcatcctgactattacccccgctttggttttcaaccagcctccgttcatggggttatctgccaacttaatgacggccccgatgcagcaaaaatggtcatgtcactcgataacacagctattcctggcggagaaatgggattttgtaagccgatgactgaagctattcaagcctggcagccagaccacgcataacaaaactctggcgtctggatcttcaggcgccagtattctttaagcctcagagcatcaccgactcacatgctgtatggcgttttgctcaaccgcccgcttatcttcttcgcccgactttcttgaccaaagaaggtcaggatcgcgataataatcgccaccgtaccggcgacgattgccatggccagcccatagttctgaccatgatgttccgcgatcgtggcctgtaatgtcgcattaaccgaagcgataagattacccagttgatacacaaagcccggcagcaccgcccgggtattcgctggcacaagttcattcagataggtcggcactacgccccaggcgccctgaaccataaactgcatcaggaatgcccgattcccagcatcagcgaaccgctagcgaatgcccacagcgggataaccggtagtgccagcagcgaggcggttataatggccttttttcggccaatcttctcggaaagcgaaccgaacagcaccccgccgatgatcgacgcaatattgtaagtgaccgcgataatactgatcgttttcggatcaaagccgtgctgcacttttaaaaataccggatacaggtcctgggtaccgtgggaaaagaagttgaacgctgccatcagtaccaccagatagcagcatagtttccagtgcgttttcagtaccggcagcagcgccgtgctttcctttctctctcgtgacgccagccataccggtgactcctgcacgcagaaccagataaacggcagcagcaaaataggcgcagcgccgataacgaacatcccgcgccagccgagtaattcaaatagcagcccataagcgacggcggcaatcagatagccaaacggataaccggcctggaaaattcccgacattagtccacgggaacggtccggaatggtttccattgacagcgacgacgccacgccccaaataccgcccatcgccacgccatatagcactcttaagaccagaaaaatcgttaatgacggcgccgcggcagacaacagttcgaaaatcgaaaagaagatgatattcaacatcaggatcggcttacggccatatttttcggcgagccggccaaaaatgagcgcgccgataggccgtacggcaagcgtcagtagtatcgccagcgtgaccttttccagcccaacatgaaacgtctgggcaatgtcactcagtaagaatacaaggaggaaaaaatcgaaggcatcaagtgtccagcttaagaagctggcaatggcggcattgcgctgtagtgaagtccagcctaacatcgtgttatccctatcctggcacagcggcctggagatgtagcagctacccgaaagaacatgcagggccaactgcatatgtaaatgtaaagtttcttaagttactcatatgttaaatacacctaataatcgtatggccgcaagttaattagcatgctaatttgtttcaaattaagtatatgtcccctgataacccgcgctggccgaatgtatagcatttgctatataggtgttctacaatgagctgtataccaattgctatacgggaaagaaaatgaaatcagatatccaactcaacatccgggcgaaggagtcccagcgagcgctgattgatgcggctgccgaaattctgcacaaatcgcggaccgactttatccttgagatggtctgccaggcggcagaaaacgtcattctcgaccgtcgggtgtttaacttaagcgatgagcaatacgccgaatttatcgacatgctggatgcgccggttgaagctaaccccgctctcgataaattgctggcgagaaaaccgcaatgggaaaaataagtgcgcctgcaccgctatcttcacaccatcagattgcggagttttgttgtggagaaacggttctcgatcaatggctaaaacaacgaggaatgaaaaaccaggctcagggagccgcgagaacctttgtggtctgcaaggaagatagccatcaggtggtgggattttattcgttagcaaccggcagtgttaatcacactgaagccactggcggcctgcggcgcaatatgcccgatcctatcccggtcatcattctcgcccgcctggcgatcgactgcgcgtttcacggacaggggctgggagctgatttactccatgatgcgctgttacgcagttatcgcgttgccgaaaatgttggcgtacgtgccctgatggtccatgccctgaccgatagcgcgaaacgattctatttacaccacggattcaaagcctcaaccacccaggaacgcacacttttcctcgctttgcctaaataactccacctttcgtcattttctctaccacacttatctttcagtttgggaaccacaccaaaggaaggataacgatgaagaaagtggcgattgtcggcgtcgggccgaccgggatctatacttttcattccctggttgaacggggtgagccgctggagatagtgctctacgagcagggtgaagaggctggcgtcggaatgccttataacgatgagcataactcagcgcaaatgctggcgaatatcgccagtatcgaaattcctcccatctatattacctatctgacgtggctacaaaatcagagcgaagactggctcacccggtatggcattgagcgtgaggccttacatgagcggcaatttttaccgcgcgtgatcctgggcgactattatcgcgatcggtttctcgcgctgttagagaaagcaaggttagcgggtttcaaagttagcgtgcgcgaatcctgcgaggttaccgatctccaggcaggacaggatggcgtcaaactgtggattaatcatgcgctcacagcggaacgtgcggattttgccgttatcgccaccggacatctctggccgcaagacgatgattcccccgagaatattatcccagtccctggagcggtttgatgcaggcgcagatagcccctgccgggtcggtatcatggggacttcactcagcggtattgatgccgccgtcgccatcgtcattcagcatggccactttacgactgacgccgatgagagcgtccaatttcggcttaatgacgcgagttataaactccatatcaccctgatgtcgcgaaacggcattctgcccgaggccgatttctactgtcccattccctatgaaccgctggaaattgtcacccatcagaggctggaagcggccatagccgagggtagtgaaggattgctggatcgcgtattccaacttatcgtcagggagctggaactcgccgcgccgcactggtgtaagcagataggcttacgccagctcaccccggatacgttcagcaacgcctggtttatcgacagaaaacgacacgatccctttgcctgggcacaagccaatttgcaggaagtggaacgcaacaaacagcaacagcataccgtgccgtggcggtataccattctgcgattgcatgaagtgattgagatgattacgccgcatcttgatgaacgcgaccgcgaacgctttaaaacagggctcgcccgggtatttatcgataattacgcggccattccgtcggaatcgattcgccgcctgctggcgctgcgtgaagccggggttattagtattttgccgctggggtccgattatcaactggaggttcaaccacaactgacggtcatccaccaccacaaccaacgcagcgaatttgacgtctttattgacgccagaggccagaaagcgctgaagagtaaagacatccctttcccgacgctccgccagcagcttctcgcctgtggcgatgagatcccggatatcggtgatgattataccctgcaggcgccggcgtgcgctcgcggccgcgttgccttcggcgcgctaccgtggttgatgcatgaccgccctttcgttcagggcctcgtcgccagcgcggaaatcggcgccgcgatggcgagagcagtttcgcagcaggccagcggtcgccggcgcaagctgtggttcagtaatgaagagtggtgatccattaacatgcgaataacgacgaaccacgtcttaagcgcaacatcggaaaagagaccgctatcctgacatgctacaactaaaggttatcaggtagcacaacgcttacgaggtacttatgagtcaactatttagccctgcgcgcattggtaaactggagctcgaaaaccgtattgtcatcgcgccgatgtgccagtattccgccgaaaacggtaaagcgaccgcgtggcaccgcattcatctcggacaactggctttttccggcgccggtttagtgattatcgaagccagcgccgtcgagcccgcgggtcgcatctccccggcggacgttggcctgtgggacgatcaaaccgaagccgccctgtaccgggtgctggaagatgttcgcgcctattcaacaacccgcatcggtatccagcttggacatgccggacgcaaagcttccgcagctgcaccctggcttggcggcggtcagttagcgctggataacggcggatggcaaaccgtagctccatccgcgctggcattccatgacggcgaccgggcgccgaaagcgctgagccatgacgatctggcgcggcttaagcaagcctttgttgatagcgcgcgtcgcgccgaacgcctgggaattgaactgatagagctgcatgccgcgcacggctatctgttgcaccaattcctctcgccgctgagcaaccagcgaacagatgaatacggcggttcactggaaaaccgcttacgtttcccgctggaggttttccaggcgatacgggaggcggtcagcgaaaatatcgccgtcggcgtacggctttcggcgacagactgggtggacggcggttgggatacggcgcaatccatcgtctttagccagcagcttgaagcgctgggttgcgactatattcacgtctccagcggcgggttgtcgccgcagcaggcgattcaggtcggtcctggctatcagttaccgttcgcccatgaaatccgccagcagatcaacgttccggtcattggcgtagggttaattaccgaaccgcagcaggctgaagattccctggtaaacggcgacgccgatctgattgccatcgcccgcgcagcgctctacaacccacactggccgtggcaggctgcggcggctctgggggcccaggttagcgtgccgccgcaatatttgcgctcggagccgcatggtctgaaaggcacactaaaatctaatcgctgaagcttcacactatgaacgatagcggcgcgaatgcgccgctaaattattgacaggaattaatcgcgggtttgtacccagaacgcgtgaataaggccaggaatatagcccagcaaggtcagaattatattcagaatgaatgcccagccgaagcccttacccagcagtacgcccagcggcggcaggatgatagtaaatacgattctccagaaacccatacactctccatacaaacaaaattaacgacttaaaaagagacttcgcctctaagcatagtaattctacctgatgccgccacgttaaccgccccctttacccgattttacgcatcttgtaatgagcattacgtcagcgtgtgcaattcatccgatgtatggttttgtgagttcgatcatgtcccctctccgcattgtcgttatccttaatctaacttgtatggtagtagactataaacaacgcggtaaggaaaagttttcatgcaaatgacgatgcgctggtttgggccagacgaagataaagtcactcttgagcaaatccgtcaggttccgggggtggaaggtgtggtcggcgcgctgtacgacgttccggttggcgaagtctggccacgggagaaaattaaggcgttagtcgagcaggcccacgctaacggtctgacgatggaagttattgaaagcgtgaatattcacgacgcgattaaaatcgggttgccggagcgcgatcgctatatcgccaactatcagcaaactatccgtaatcttgccgcctttggcgttaaagtcatttgctacaactttatgccggttttcgactggatgaaaaccgacatgaactaccggctggcggacgggtcgctgacgatggcttttgaaaaagccggcatcgataaaacgctggaacaggtcgttgcggaagtgctcagcaacgccaacggctatgccctgccgggctgggagcccgaacgtttaacgcaggtacagacgctattcaacagctataaagcggtcgatgatgacaaactgcgagaaaatctggtctattttctgaaaaaaattatcccggtctgcgaagaggtcggcgtgaaaatggccattcatcctgacgatccgccgtattccatttttggtctgccgcggatcataaaaaaccgcgacgatctcgactggttgtgccgtgcggtggattcaccggcaaacggtattaccttatgtaccggctctattgccgaggagccgcaaaataacgtttatcaaatcctcgcggaattcagccagcgcgggcgcattcatttcgctcatgtcagaaatattaaaatcataaaagacaaagatttctacgaatcggcgcaccctacccgctacggttcgctcgatatgtaccgggtgatgcaggcgctgcacgacaacggtttcgacggctatatccgccccgatcatggccgttttatctggggagagaccggtcgtcctggatacggcttgtacgatcgcgcgctcggcgccacttacctgctgggattatgggaagcgctggaaaaccagcacgcctgatccgctcgtcaccctggtgccggagctctccggcactgaaaataataaaatcgctgttgggaggatgccatgtctgcagccctggctctgctatgggtggtggtcggtattgcgctactggtcatcatgaatctgaaatacaaagtacacaatattttcgccttattaattgccggcctgtttgtcgccgttatggaaggtgtgcccctcgataaaatcgtctcgatggttcagcaaggactgggcggaataatgggacacctggcgctgatcattatattcggcgctatcatcggcaaatttatgactgaatccggcgccagccagcagattgccgatacggtaatcagacgttgcggcacccgttatctggcggtcggcttgatgtttatcggcgtcatcttcggcattgccatgttttatgaagtggcgtttttgattgccatgccgttggttctcaacatcgccagcaaagccaatatcccgtggatgaaactggttattccgacggtcgtcggcgccaccatgggccatagtttatttccgccacagccggggccggttgcattagtcagcgccttccaggcggatattgttcaggtttatctgtacggcattatcgtgatagtcccggcgctgttctgtgcggggatcctgttacccgcctggcttccgggtatccgcgagatgaagctgaatgccatgattaaaccgcaggaggagaaacctgccgacgcgctgccgtcgtttgcggtcagcattgccattccgctgatccccgcgatattaatgattgcgtcttcgctgattcagtcgctgtttggcgcggcctcttctgcggcaaaattcttccagttcctcggtagcgcggaaattagcatgctgttggctaccggcgccgcaatctggctgctcggctgccgccgcggtatgaacgccgttcaggttaaccactgcgtcacggactcggtcgccagaattgccaacgtcctgttcgtcatcagcgccggcggcattcttaaacaggttattatcgattctggcgtcggcgaccatatcgtcacgatgatgagccacgtcccgctgtcgccgtttattatcgcctggctgattaccgctattattcgtattcttaccggccagggcgccgttgcggcaattacttcagcagggattgtttcgccaatggttaccgcatttcatcttaatccagcgctgatgtgcctggcggtggcctgtggtagcaataccattactttgatgtatgacggcggctttttactctttaaggaaacgtttggcatctcgatgcgcgatacctttaagacctggggcttactggagctaatcaactcggtggtaggtctgttgatggtgttattactgagtctatttatttcctgagaaacgcaccgcggcggcgacaataccgccgcggtaagcactcaaatatttactgttggccggccggcgcctgctgcgctggcgcttgctccggcgcgatactctcttttatttctttggttttattggcggcatcggcggaaagctggttggcttcaacgatagcgttatctttaatttttcccgcctctttcatgatcgcatcgcttttttgctgcgcatcctgttttaccgcatccgctttatttttggcatcctgggcaatcgcgtcagctttcttgtcggcttcagatttaatactgctggcctgagttttcaggctatccgcttcattattggcctgcgttttgatgtcgtcgatctgcttatccgcttcttgcttaatggcccgcgctttatcggcggccgcatctttaatttgttccgcgttatctttggcctgatccagtttattgtcgactttcgatgagtcatcgcagccaaacaacgccaggcacaatgcagaggtaatcagcgttttattccacagtttcatcagtattcccttatcggtccaggtggtaatccagtgacggtcatagccttgccgtatcggcagagttaatttatttataatcgctatgcctggagagtcaagctatcgataattttcagtaatgctttgccggaaaatgcatagaccagccaacgccagcggctcatttgcttaaaaacaaggcaaaaaaacgctattccagcaatcgatacgcccgggcggataacctgctttccttctggatggctaaaaagcatcttatattccattttgcgctaaacggcagatttatgttctttaaaatgccgtttttacagttctaccattcagctatctcgatacgaatgggtaaatggttatgtcactctttcactctgtaagcgaccttattggtcatactccgctgttacagctgcataaactggataccggcccgtgtagcctgttcctgaaactggaaaaccaaaaccccggcggttcgataaaggatcgcgtggcgttgtcgatgattaatgaagccgagcgccagggaaaactgcgcccggaggcaccatcattgaagccaccgccggtaataccgggctggggctggcgctgattgccgcgcagaaaggctacaaactgatcctggtggtaccggacaaaatgagccgtgagaaaattttccatctgcgcgcgctgggcgccaccgtgcagttaacccgctcggacgtcaacaaaggccatcccgcctattatcaggactacgcccgccgtctggcggatgaaacgccgggcgcgttttatattgaccagttcaacaatgaagccaacccgttggctcatgccaccactaccgcgccggagctgtttgagcagctcgatggcgatattgacgccgtggtagttggtgttggatcaggtggtaccctgggcggtttgcaggcgtggtttgcgcaacattcgccgaaaaccgaatttattcttgccgatcctgcggggtcgattctggctgatcaggtagacaccgggcaatacggcgaaaccggctcctggctggttgaggggatcggcgaagattttattccccactcgcccatctggagaaagtgcgcaaagcgtggcgcgtgaccgatcgtgaagcgttcgccaccgcccggcagctgctgcaagtggaaggtatcctcgccggatcgtcaacgggcaccctgctgacagcagctctgcgctactgccggtcgcagtccaccgctaagcgggtggtcaccttcgcctgcgatagcggcaacaagtacctgtcgaaaatgttcaacgacgactggatgcgccagcaaggtctgataagccgcccgacgcacggcgatcttcgcgattttatcgccctgcgtcatgacgaaggcgcaaccgtcaccgccgcgcccgacgatacgctggctgccgtccttgctcgtatgcgcctgtacgatttctcccagctgccggtgctggaaaacggtcacgtggtaggcatcgtcgatgaatgggatctgataagccacgtccagggcgacagccggcgtttcgcgctgccggtcagagaggcgatgacccgccatgtcgaaaccctggataagcacgccccgaaagcgcgcttaaagatatcttcgaccgtggacatgtcgtggtcgtcaccgataacaatcggtttatcggcctgattacccgtagcgacgtcctgaccacctggcgtaaccgactggaacaataaggaacgaacatgaaaaacttacagacgctcagcgtccatagcggcatttttaacgaccagcatggcgcggtgatgccgccgatttacgccacctccacctttgcccaacccgcgccgggccagcataccggctatgaatattcgcgtagcggcaatccgacccgccacgcgctggagacggccattgcagagctggaaagcggtagccggggttttgcttttgcttcaggcctcgcggccatttccacggtactggaactgctggataaggacagccatctggtggcggtagatgatgtctatggcggcacataccggctaattgaaaatgttcgccgtcgtagcgccggactgcaggttacctgggtcaaacctgacgatctggcaggcatcgacgccgcgatccgccctgatacgcggatgatttgggtggaaacgccgaccaatccgttactcaagctggcggatcttgcggctattgccgagattgcccgtcgacataacattatcagcgtcaccgataataccttcgcctcaccgatcatccatcgccctatcgagctgggctttgatatcgtagtgcattcagcgacaaaatatcttaatggccattcggatgtcatcgccgggttggcggtggttggcgacaatccgacgctggccgagaagttgggctatctgcaaaacgccgtcggcggcgtacttgacccattcagcagcttcctgacgctgcgcggcattcgcaccctggctctacgggtggaacgtcatagcagcaacgctctgctgctggcggaatggctggagcagcagccgcaggtcgagaaagtgtggttcccctggctcgccagccatccccatcacgatctggcccgccgacagatggccctgccaggcggtatgatttccgttgtggtcaaaggagatgatgactacgccgggcgcatcatcaaaaaactacggttatttaccctggcggaaagcctgggggtgtggaaagcctggtgagccagccattcagcatgacgcacgcctccattccgctggaacagcggctggcgaatggcataacaccgcagttgattcgactctcggtaggtattgaagatccgcaagacctgatcgctgactggcgaaacgcgctacgtgagtaaacgctaaccccgcgcgcggcgcggggtttcattaccctcagcagaaacataccgctttggcgttttccgtcggatgatagggatcgcttcggtgatcgtcgctatcatcccgtttacgcgggatctcgccgtgtttacccggctcttctcgcgccggatgtttaccgcgtttatcgagttcatggtgatgcgctctgctcattctcgggctctccggttaattgggcgcttgtttgcgtaccttatcaacccgcaccagcggcggcgtcattttgctatcaaggcttccgttgatgctcaccagtttgtctggcttgatttcctgaccatcgaaaacggctgccggaataatggccgcaatggtgccagttttatcacggaacagataacggtcgtcgccttcatgcttaatcacattgccgcgcagggagatagtcgcgccatcgtgcatggttttcgcctgctcaacggtcatgatccggccatcctccataccgcgatagccgtcgtccagctggtgcggcggcggcggtgcggcatcgtttttaaaaccgcccttttcttcagcccagacgccagcggtgagtaacaaacagagtgtcgcgattagctttttcctcattatttcacctttaatgtcagcagacggttatttaagtctggtcgctgatagcgattttaacaacgtcaataattctgatatcagctaaaataacaacgtcgctatcgctacgttaaatataaacatcatgctggagccaaaataatggtcaataatcaacaggatccgccagagataaacgagaatctacaggcgttacgcttcgagtataacttccggcgctacggggtggtttttctcgccattattatcattgctgcattatgcggtttattttcctctggtttcctgagttctgcccataaggagaatcccgcttcatcgttaatggtagactatgaccgttttgccaggctaatgagcgaaaccgaagtcaatattcaggtgaaaaacagtggcctcgctcatacctcagtggatttttcacccgcgttattaagccattaccaaattggtgatattcgaccgcagcccgataaaatgtacagtgctaacggtcatctgatcctggtttacaatgaaaatactcgtggtgcgcctgtttcgctgtggttatctatcacgccaaaaacatttggcaacctttccacgacacttcaggcgaatcagcaagctgccgtcacctttaaccaatttgtctttccgtaggagtctcaacgatggaaatggtgctcagagccgtcgcaatctatcttatcttattgattatatttaaagttgctggcagaagaacgcttatgcaactcaccagttttgatctgattttactgttgattatcagtgaggccacccagcaggccatgctcagcaccgactattctgttaccggctcaatgctgactattgttacgctggtcagcgtggatattttatttggctatattaagaaacgcttttcgcaggctgagaattatcttgatggttcgccgacgatcgtcgtagaaaatggtgttgtcgctgacgataaaatgaaaatggtcaatatctctgtggatgacattttgctcgccgcgcgacagcaccatggtatatatcaacttgagaagattaaatttgcgatcctcgaacgtaatggccagatttcaattattccgaccgaagcgtagagacgttacttatcgcgttccggttgtttatcgcctgactcaggagcccgtgtcgggtcgtcctcttctttttcagtaacataattaatatacataccacctccaactttgcggcattgaattataaattgtagcgttatcatgaaatttagccattgccataataaataatgtcgtttgttagccataataagtactctcggatatttccgaccaccggccagcaatgaatcaataatactcaagtactcagtgaccaatacaccatggcgaaatgccatgttcagaccaattgaggcgactatggcggtaatggttatcaccggcggcagcgcgggcgccggtaaagcgacggcgctacgttttgctaaggcaggctatgatgtggcgattattgcgcgggatgaaagtgggctacaggaggccgaaaacgcatgtcgacagtacggcgtccggacgcaggttatcagcgctgacgtcgctgacgcccgttcgctgcggcaggccgcggcggaaatcgaaacccagctcggcgccattgaagtgtggatcaataatgccatgaccacggtgttagcgcccttccatttgatgagtgatgatgaatttcgccgcgtgacggaggtgacctatttaggttatgtcaacggcacacgcgccgcgttggaagtgatgagccccagaaaccgcgggataataatccaggtgggctccgcgcttgcctggcgttccattccgttgcaatcggcgtattgcggcgcgaaggggcgattcgcggatttaccgatgctgtgcgaaccgaactgatgcatcaacatagccggatccaattaaccatggtgcaactgccgggaatgaatacgacgcagtttggttgggcaagaaataaaatggataaagagatgcagcccgttccccggtttatcagccggaggtggcggcagaggcgatttttagcgtcgttcagcgccccgttcgcgagttgtgggtaggtaaaagcaccattcaatccatcgttggccaatttttcttcccttcactactcgaccgcctgatggttaacaaagcctgggaaggtcagctgacagcgcaagcgaaacgtagcgaaaagccagacgatctctattctgccgtgcggggcgagcacagcacccgcgggacatttagcgctggcgctcgccagcactcatttaacgtcagtgccgatttgcccggtaaagtcgcctccggcgttgggatcgcatttggactgatgatattacgcggactactacgccgcccgcgcaagcgccgttaatcgtgctggcggctaaaccagcgataaccataatcggcaagctgtaaccggcagaccttgccgccggtaaggctatcgcgataacggcggtcctccagcacgcaggaccagtaacctgtctcctgacgcggcaatcgtacctctaccgggcgttcgctgaagttcgccagcatcagcagatcgcgagattgaccgcggtagcgcagcgctaacaccgatggcggcaagccggacactagctcaaagggggtggcccccggctcatggtattcggcgcgcagttgaaccatctgccgcactcgctgcagcaacgagtggcgttgacgcagcgccagttcgacgttgacctgctgatatcgccagggaccgctggtaaccggcctgacgagtaatttttccgccgcggcggtggaaaagcccccattcacccggctgaccattgcataggcgtcctcacggcataacgctctttcagcgacagatcctcgcccataccgatttcatcgccatagcgcatcacaggcacgccaggcagcgacagtaacaccgcatgacaaagcgccagccgacggatattgccctccagcatcggcgccaggcggcggcgaatgccacgttgatagactgacattgacttctcgggggcaaaacagcgcagcacaaactgcctgtctgcgtcctcaataccctccaggtcgagctcatcgtgattacgtagccagttagcaaaacagcaaccgggcggcggcttaatcatcgcttgcagcgcgctaacgagcggcttcgcactctgccgggcgaggctgacgtaaaaaaatttgttcagccagaaattaagcaccagttgcagacgatcgctgtggccgaaatagtgacgataatcgttcactgccacgtcaacttcaccgagcagaatggctcctggatgggtccgttcaaccagttgccgaagatgggctaatatccagtacccctgctcttcgtcgccatttccggcttgcttaaccagatgcgaggcggcgtcaagccgaaaaccgctcacacctgcgcgcagccaaaaacgcacaatattgtcaatttcgtctatcaccggagggtgcaccagattgagatccggctcgtggctatagaacatgtggcgataatactgtcccgcctgttgatcccagcgccagacgctcttttcgacaccgggaaacattggcggatcgtcctgttcgggcggcgaatcggcccagagataatatgaccggaaaggagaatgtttgtttttacgcgcctcttgaaaccaggggtgtagcgaagaggtatgctggataaccaactcgatgattacgcgtatccccaattcgcgcgcgtcatcaatcaattgaataacgtcactgatttgcccaaaacgcggatcgggctgcagataatcctgcacatcgtaaccgtcatcgagaaatggcgtcagataaaagggagttaaccacaataccgtcaccccaaagctacgtaagtaatagagtttttgccttatcccggccagatcgccacagccatcaccattggcatcataaaacagcgaggtatcaacctgataaattacagcgtcttgaaaccacggttgatctgccatcttcgtccctcgttttagacatgcagccccgccagcgtcataaaaccgcgcaccagcgtactgatgattaacaccaccagaacgccgcagcaccagatcaacagcagccagcccagcctttttgcgatacgcttacacattagtgatagccctcatctgcccgcaccttgccgcgaaagacccagtaactccaggcggtataggccaggataaccggaacaatcagcagcgtgccgaccaacatgaacaactggctggccactggcgccgctgcctgccagagcgtcacatccggtgggatgatccagggccagatacttatccctaaaccgctaaaaccaaggaacagcaacccaagcgtaagaataaaaggcgcggcgtggctgtcggcgcgttgactcagccgccataaccagaggctgagggtaaggaccagtagcggcaccggtagaaaatagaaaacattgggaagcgaaaaccagcgctcagcaattcgtgcgagggttagcggcgtccataagctaatgacagccatggcgattagaaaaagcagcaacagtgtgcgcgttaaccgacgcatcaagcgtaacaacgccccgtcgctttttaaaataagccaggtcgccccagtaaggcataagtggcaattaacgccaatccacagaacaaattaaatggcgtcaaccagtcaagcggcgaaccagcgaactgccgcccatgcaacggaaaaccatgcagaatggcgccgacgacgatcccctggctgaagatggctaataatgacccccacataaacgcgctatcccaaaaccggcgatgggattccgcggctttaaaacgaaattcaaacgccacgccgcggaatatcaggccaataagcatcgcggtaagcgggatggtcagggcgtcaacgatcaccgcgtaggccagcggaaaagcgccaaataaccctgcgccgcctaataccaaccaggtctcatttccatcccacacgggcgcaacgctattgaccatggtgtcgcggtgcgccttatcgcgggtaaataaaaatagcgcgccgatgccgagatcgaaaccatccataacgatatacatcagcgtggcgaagatgattatcgcaaaccagattactgccagatccactcccatcagaatttctcctcactcggtaatttatccggcgccgataaaggacgcgctggcgttccggaggaattaagcgctaattccgattcaggctgaggccccagtttgagtagacgaataagatagagatatcccacgccaaacaccgcaaaatagacaatcacaaaggcggccaggctgatactcatctgcagcgtactatgcgctgagacggcgtctcgcgtacgcaacagaccatacaccacccagggctggcgtccgacttccgtcgtgatccagccggccagaatggtcagtaagccgacaggtcccatcgctaacgcaaaccacaaaaaaggtcgcgagtcgcataaacgtttatggcgacgtaaataccagccaatggcgccaagcgcgatcatcaaaaaaccggctccgaccataaaacgaaacgaccagaaaacaatcgtcgaattaggccgttcgttggcgggaaagtccttcagtgctggaacctgggcgctacgactatgggtgaggatcaaacttcccagggcggggatagccagcggatatcgtgtgcgctcttctgccatatccggtaggccgaacagcagcagcggcgtagcttcgccgggtttattttcccaatgaccttcaatagcggcaatttttgccggctggtgcttgagcgtgttcagcccatgcatatcgccgactacggcctgaatgggggcgacaatcaacgccatccacaatgccatcgagaacattgttcgaatggctggcgtatcgttatcacgtaataagtgccaggccgccgaagcaccaacgaacagcgcggtactcagaaaggcggcgatagacatatgaagtaagcgccaggcaaacgaagggttgaagattatcgccagccaactatccggtataacctgcccttgctcaatatgaaaaccctgaggcgtctgcatccagctattggaagcaagtatccagaacgttgaggccagggttcccatggccaccatacaggtcgaaaagaaatgtaatcccggcccaaccctgttccagccaaatagcatcacgccaagaaatcccgcttcgaggaaaaaagcggttaaaacttcatatgtcagtaaaggcccggtaatactgcctgcaaactgggaaaaaccgctccagttagtgccaaattggtaggccatgaccaggccggataccactcccataccaaaattaatcgcaaaaatatttagccagaaatgataaagttggcgccagatcaggcgtcgtgtttttaaccacatgccttccagtaccaccagatagctggcaagaccaatggttaatgccggaaaaataatatgaaaggagatagtgaaggcgaactggatcctcgcgagatgaaatgcatcaaactcagccatcaggttccccttattgacaagacagtcagattgattgaccaaagaaagggtaaccgccagcggctaccctttctttaacggatgacttttatcccgtacaggcgtactacgtctggctagtttatctaccagaatttgctgcctcggggtcaacgacgggcactggcagtgctcgccgaaatttatctctaatgtaatttgccgccctgctgccgttagcggcggcgcgctatcgttaatacgcgacaagatagcaaggagacgaatcatttacagaccttttaccgctaacgcttagcatcaaaacccggcgtttcggagcggataatatattgctccgtaatatccggaatatgttgcagcaaccattcggccatgcctctctcttccgccaaaatactttctaaatcagcaattgaatcatgatcgttgaccttttgcgcggcggttaataaggaggtataacaggccacctcaaattgctcgaaaacgtagccgctgatcactcctttcaccacttcatcttgcgggaacattcctccaatagattgtcccattgcggcgattttactcattgagtctttaagaaccgagcgggaaatattattgcgcgcaataatatcgtccagcacggtaatttgccgacgggtctcaaaaagatgctgctcaaggcgggtgcataattccgggtagctgtcgatgcgtttgaccatcgattcaagcatcgattcggcctgcttttccatagcgtgcgcgtcacgcaaccaatcgtgataattttcaatatcagtcataacaacctctttataaaaagataattactcttcagccttatcttcattttcttctgcggcctggtcggctcgtgctgcgctataccctgataagtggccgacaatatttgcataaatactaataatgatgacccacaggacactgtctttccaccatattaccgacggtatagccagtacaaaccacattatcgccgcgatgagatgacacctttttattacaaccggactaagactcatttttttgcctgatgccttagataggattaagcggactgttgggcatcctgattgacgtgtccaacggcgatgtccgttaatttcatatcagcgtctttttcttcttccagcgtttccgccagcaatttcaccgcggctttatagccgagctgctctgccagcgtacacagcgtaccgtaggccgcaatttcatagtgttcaactttctgcgcggcggctatcagcgcagcatcgcggatctcgttcttttccgtcgcttcgatcacttcgttggcctcttcgataagcccttccatcgccacacacttcatccgtttcaggcgaatttgatcattttgttcaaggagcttatcaatacgttctatatggccctgtgtttcctcaaggtgagcgctgaatgccgtttgcaactcttcacatgcgctggcgcgggatagtttagccagcgcgcgggttaactgtttttccgcgctgtaggtatccgataataaatggataaaatatcttcaatggtttgtattttcataagtcacaccttttaaaaactgcgggtcggatgacccgcagggtatttttaacagcagttaccagatcaaatcacttatattcacaagctagctatcaccggatttacggccgccgccatggctgtttttaccgccttttttaccggcttcggatgcacgttccgggtcatttttaaaattcccgccgctgtgctgtccgcctttacgtccggcttcagatgctttttcccggtcttctgcaaaattacctgaaccacctctgtgttctgccataacgtttaccttttagcttggttagtaaaagatgatttaacgctctaaatcatcgccgtcgagaattaagtctggagcaataagtgaaaaatgcaaattaaagaaaatatattaacagttgctatgaaattaattaaaaaataaatagcggagcggaacaaataaccggagtatcgctaagatcatattaacaagaagaaataaacgcaacggtgcggctaaaatttacaacgacttgagcatgagaaaatagaactgtaaataaagttaaatattctgtttttaaatatttcgctgaataatctgaaaaataatccagcgaaagattatatataaatcgccttatatcagtaagttggcgaaggaaaagcgggaatatgtccattgggcagggatttacatttatcgtagcgtccgcataccttctatcattactcttttctgtgaaggagattgctatggataatgacaaactgcgtaccaaccattggccacaacccctttccccgatcaaccgcaaacgcctcccggcctggccgccgaaatggaacccacaccggatcatggtgaagtcagctacagcgggtcaggacggctacagggtaagaaagcgctgattaccggcggagactccggtattggtcgcgccgtggctatcgcctttgcccgcgaaggcgcggatgttgccattaactatcttccggaagaacagagcgatgcggacgccgtcatcgcgcttatcaaagcggaaggccgtacagcggtggcgataccgggcgatattcgcgtggaatccttctgtgaaacgctggtggaaaaagcggtaagcggtcttggcggtttggatattgttgtgaacaatgcaggtcgtcagcaatactgtgaaaaaattgagcaactcaccaccgccgatttcgatgctaccttcaaaaccaacgtctatgcgccgttctggataaccaaagccgcgctgccgcacctcaaagcccaaagcgtgattatcaacacatcttcggtacaggcttttaaaccgagcccgattttgctggattatgcccagaccaaagcttgcctggtggcattcaccaaatcgctggccaagcagttagggccgcgtgggatccgggtcaatgcagtcgctcccggcccgtactggacggtgctgcagtcaagcggcggacagccggcggaaaaagtgcaaaactttggcggcgatacgccacttgggcggccagggcaacccgttgagatcgccccgttgtatgtgactctcgcctctgatgcctgctcgtatgcctccggccaggtctggtgttcagacggcggtgacggcgtactttaataatggaatgccggcagcaccagttcgccaatctcctgcatcgtctcggccagcggacgctggttgcgacgaaaatgcagaccgatatggttcacgccggcatcgcgcatcgcgttcaattcctgaatgagaccatggcggccgctgctgatgccgaaacgatggcgctgaatcggcgcattggcgtcatcttgcagatccaggtggataaagctgatatagggtttctcgcccgctacccgacgccacagcttgacgcggctaacgtgctcgtcaggctggccagggtaggcaagccagccatccatattactgcctacccattgcgccgtttgttgcgccaaaccagcaaccagcagcggcggggtcggtttggctggcagtaactccaggcccggctccagctgacgatcggtctcgcccttcagcacgctcacgccgtgacgaaaacgctcgccgcggctggcgtaatcttcaccaaatagcgggtattcgaccggcctgtcgccgctggcgatgcccaatagcagccggtcgccgctgagcgcctgcaccgtggcggcggcttttcgtaccagccatggctgacgtagcggcagcacaaccgccgccgtgcccagcaaaatattttgcgtcaggctcgataaatagccgaggtaggtaaaggcttcaaagacgttagccgcatcgccaaactgcggatcgtacagcggaacatcacggatccaggcagcgcgaaacccgagcgtgtccgccagtttaatgcgctgcgcgtgcgcgctcatatccggcacgccaaacggtcgcccgtcgcgctgccgttttagctgtccgcttgtcgaccagtcattgtccagcggcagttcaacgccaatcgttagcggctgctgggttaatttttcgatgctcatgagtcactccgtcaaccgccgggcggtatcacgttgaaaatatgagcaaagtgtttcatggaatgctattgcaataaacagcactaatcgcaatagataattgctatttatggaattatctttagttctgattttgttttaatggaccgctcaccaacaccagaggaagaaacaatgataaaaaccgacgcctggctgtggaaaaggcacgcctccccgcttctgcttgaacgctatgagaaaacattagtcacgcccgctgacgatcaggtgctgatcgagaaccgcgccattggtcttaatccggtcgactggaagctgatggctggtctctccgacgcctggcaggaggatcagatccccggcgtcgacggtatgggggtgattaccgccgttggccgcaacgcccgccaccttcgtcccggcacgcgtgtgatgtatcacaccgacctgcgttttgacggtagctttgcccgacatacgttagtcagcgcccaggcggtgattgcaattcccgaccacattagcgaccttaccgctgcggcgctgccgtgccctggtctgacggcgtggcaggcagcgcaaaagatccccttccggctggcgagaatgtactggtcagcggcgccggcggcgctgccggcactctgctaagccaattactgattgaaagcggcgctaacgtctacgtcacggccagcgccacgcatcacgcgaaactactggctcgtggggtgattcaggcctttgattatcaccatacctcctggccgcaggagctaaaacacgccctggcgggtaaatcgctgtatgccgctttcgataccgtaaatcagcaaaatgccctttcgcttgccgggttgatcggctactacggccatctggtctgtatacaggaccggctcgagcacgcgccgctaccggcgtttactaccagtatctcattgcatgaggtcgcgctggcggctatccatccttacggtacccagaggcagtggagtcgattgcgtcaggccggggaaaacatgctgcagcaaattggccgcggcgaactgatgatgccgccgatagaaagtgtcagtttcgatgagatcccacaggcgctggaaaggctaaaacagaacaataacggtattaagtacgtagcggtgctgtaatattcatcagcacgatgaataacctcaatcccaaaaaccgggtaatcaatgccacatccaatgggcctctttccgctggatgaggcattcatcgcttcgcttccgtaggtcggtctggtgctgaatggttacaatagcctgggattcagcagagtgattagcaaaaatataacagctagatcgccaactaatagtcacacacatcgattaaaaactcagattgaaagaatcaaaaaaggagtaacgttaaaaaaacattaacaaagaggtgcaaaatgttacgcgattatttaaaactggattctgaagaccaattagttgaacaacaaagcggtcatcaaccttgccagcagtataccgaagtgactgagtgggtaatcctcaataaagagggtaagaaaaaaggccgcgtctccctgtttgataaatttaatactcgccgctcgtggaacgttaattttcgcattacccaatttgataacagcggtaaagttatcgttgaccaactgacagacgctatttaacagaataattaataacatagcgcccaatctttgatggaagccacctgacaaaacgctgaggccagcaaccgcattcacgcggggaagggtaagtagtttttcaactcatcaattagccgctcgttttataataataaaatgagtactcgctgcgcctgatgaaaaataaacgcgccagtcggcgcgtttaataattaattgttactgaccggcggtgtcaccctgacgccaataaagacaatcagcatggcgcttaataataacagcccgctgccggtaaatacgccgctggcgccgctgatatcaaatattgccccaccgccggcagctccggcgctaatggccagctggatcgccgcgactaataatccccctgcactttccgcttcatccggtaccgtagtggcaagccaggttgaccaggccaccggtaccaggccgaatgcaaatccccacagggcgaccaacaggccatccagtagcgcaatatgaccatacagcaccatcatcagcgccagtacgctcatcgccagtggcaccagcgccagcgtcaaacgtaaactacgcgccaacagatgcccggcaagcgaggtgccaataaagttggctacgccgaaccccagcaaaatcaacgacaccccttctacacttgccagcgccacggtttcgagaaacggtcgcagataggtaaagaaagcgaagtggccgccaaaaatcaaaatcgaagccagcagaccgccaaccattcccggccgccgtagtaccttaaagagcgtactaaagctgccagcgctctccgggcgcatcgacggcagtacccatagctgccacagtagcgcgaccaggctcggtacggcgcagatgataaagacgttacgccagcaaatgagcgcgccaagatagctacccagcggcgccgccactacggtggcaatcgacaccgccgagaagataatcgccagcgctttcggcaccatcgccgccggtaccaaccgcatcgccgtcgccgtcgacatcgcccaaaagccgccgatagcgataccaagcagcaggcgtcccagaagcaggaactccagtgaaccggcaaaggccacgatcagactggagatgatttgcaatacggaaaagaacatcagtacccagcgacggtcgatattgcgggtagcagaggtaatcaataaccccgtcaccagagcgattaacgccgtggcggtcaccgcctgtccggccatcccctcactcacgcccaggctgctggccatcggcgtcagtaaactggccggtagaaattcagcgacgatcaggccaaaaaccccagcgccagcgcatacacggcgcgccacgccggacgggtgttaatcgcgctctcttcagcgacaatgcaagaactcatatacatctctccagaatcattaacattcgccaagcttagtggcttccgttaagacgatatatgatacatactctgcaattattgattattcgtccggaaaaacgatgagccagcaaaccttagatctgaccagcgagctgttacagggcatgcgactgtcgggagtgaaataccgacggattgaaacctcgcgtcctttcggcgtggagtttaattcggttcctggcaaagcgcagtttcattttgtcagccgcggcccgctgctgctacaaatgagcaacggtaaacagttctcgcttgagagcggcgatgctgtgtttattcccaatagcgatgcgcacgccctgctctcagatagcaaagccgcgcgggtgaacgtgatggagctcgacagcaaaccggtctgcgggacggtttcctgcatcaaaaacgcgggctgcgttaataccgaagagaatgcggttatcttcagcgcctgtatggattttgaattaggcggaatgcagccgctggttcgggccatgccggaggtaatgctggtgagtagcctgttaagcgcccgcccggaaatccagccgctgctggcggcaatggagcgtgaatccctgacgcgtcaggtgggctatgccggcattctggcacgtctcgccgatgtcgtcgcggcgctgatcgtccgcgcctgggtggaatgcggctgcggtaacgctaccggctgggtacaggtactgcgcgacccgaagctatcgcgcgcgatatacgctatgcatcagcagcccggcgtcaactggaaggtagaagacttagcccgcgaatccggcctgtcgcgttcggtgttcgccgaacgttttctcaccgccaccggcaccacgccggcccgctacctgacagaattacgcatgcgcctggcggtgcagtacatcagccatgaaggcgaagcgctggaaaaagtcgccttccgcctcggctacaactcgctcgccgcctttagccgcgcctttaaacgcattaccggcaaagcgccgggagcgctacgcaatggggtcaatgaacaagcggtaacctgataagcgttacttcttctgccagttagcccacgggccagcgtcggtgggtttgtcgatgagcccttccagcgaatcgagataaaagttttccacttctttgcgcgcccacggcgtgcggcgcagaaatttcaggctcgacttaatgctcgggtcgcttttgaaacagttgattttgatatgtcgggccagttcgtcccagccatatctggccacaaggtcagtgagtaacgcttcgagcgtcacgccgtgaagcggatcttttgacgtgtgcattgtctttcctgaatgaaaaatttcgctcaccatacggaccgcggcggcatcatgcaacatcccgccacttttttacatcacacccacgcggtttcccctctccttatctgtttttcgcaaaagcactgaacccaccgcggtcataaattagaaaagaacgttattggtcgaaaaaattgcgctaaggcaagctgagcgcatctacccgacagaggaaatcatcatgcgccgttgttgttgccgaacccagaatcacttcatagccaatgacccgtaccccgttttcggagaacacaatgaacgccacaactttgccgattctcgatctggcccgctataccaaccctgctgaaaagagcggttttcttgccgacctccgccatgccgcgcgcgatataggcttcttttatcttattaatcacggcgtggacgccggattgcaaactgaagttcaacgccaggcgcgacgctttttttctcttgatgatagcgaaaagcagcaggtggcgatgattcactccccgcactttcgcggctataaccgcgcggcttccgagctcactcgcggccagccagactggcgcgaacagtttgacatcggcgccgaacgtccggctttaactctcgccgaaaacgcgccacgctggcagcgtctgcagggaccgaacttatggcccaccgcgctaccgtcgctgaaaccgaccctactgggctggcagcaggcgatgaccggcgttgggatcaccttgctgcgcgcgtttgccgaagcgctacagttacctgccgacgcctttgacgcgctgtatggcgagaagccgaatgaacatatcaaactgattcgctaccccggtcagcgtgaaaccaaaagcgcacaaggcgttggggcgcataaagattctggattcttaagcttcctgttacaggacgagcaaaaaggactgcaggtggaagtcgcgccggagcactggatcgacgccacgccgctggcgggcagctttgtggtgaatatcggtgagctacttgagctggcgactaacggttacctgcgcgccaccgttcatcgcgtggtctcgccgccggcagaacaggaacgcctctctatcgccttctttcttggcgcgcagctcgatgccgtggtgccggtgtaccgcctgcccgcccatctggcgcaggaagcgctcggcccggatagcgatccgcaaaatccgctgctgcgggatgttggctggaattacctcaaagggcggctgcgttcccacccggatgtcgccgaacgttattaccaggatgtttttcgcgaacgtactgagcaactgatcgtttaatttaataaggataacaatatgaaatatgccgcattcaaactggcaggggtcgctttatctctttctctggcatggacatccgcccaggctgccacgctgcgcgttgccgctgacccggtaccacacgctgagatcctcaattacatcaaaaaaatcgatcccagcctcgatatcaaagtggtcgaactcaccagcggtgttaacgccaacgagctgctggcgaatggcgacgttgatgccaactacttccagcacgttccgtatctgaaggatcaggaaaaagtgctgggtaagacctttaccgtcgccgctacggtgcatattgaaccgctgggtatttattcccgtaagcacaaagactttaattccgtcccggaaaacgggaccgtcgcggtgccgaacaacaccaccaatctcagtcgcgccttgttcctgctacaaagccagggattaatcaaactcggcgctaaattcaccaacccggcgaccacgttagccaccccgaaagatatcgtggaaaaccccaaacatctgaagatcctcgaaattgaatcgccgcagatcccgcgttcattagacgatgtcgatttagcggtcattaacggcaactacgcgctggaggcgggactggtaccggcgaaagatgcgttagggctcgagagcgcgaacaacaacccttacgccaatatcctggtgacgacgccgcaattggctaatgacccacgcattaaagcgctggccaaagatctcacctcgccgcaggttgccgagtttattcgcaaaaactataacggctcggttatcccggttgcgccgcaatcatgattgaggtcgtcgggctgagtaaaacctatgccggaacaggccgaccggcgttaaacgacgtgtcgctgcagatcccgaaaggcgcgatttatggcattctcgggcgcagcggcgcaggcaaaagcacgctgatccgctgtcttaatttactcgaacggccctctgcgggccggattgtggtgaacgggcaggatatcactcagttagacaaagccggtttacgtcagcaccgtctgcgcaccggaatgatcttccagcacttcaacctgctgcatgcccgcaacgtggctgacaacgtcgcggttccgctggaaatcgccggtgtcgacaaacgtgcgcgccgcgaacgcgtgctcgagttgctggagttagtgggactggcggataaagcaaccgcctttccatcccagctttccggcggtcaaaagcagcgcgtcggcatcgcccgcgcgctggcggccggcccggatgtgctgctatgcgatgaagcaaccagcgccctcgatccggacaccaccgcctcggtgctggcgttactggccgacatcaatcagcggctcaatctgaccattgtgcttattacccatgagctggaagttgtcaaaacgttgtgcgatcacgcggcgctgctggagcatggcgaagtcatcgagagcggtaaaatcgccgacctgctggtggcgccgtggtccagattacgtcagtcgttactgcataatccgcaggcggagcaggatttcctcgcccgccacggctttcacgggaggcctttatgcgtagtcgcatgagctgggaagatttatggcccttattatgggaaggcagcctggaaaccctctatatggtagggctggcggcgctgtttaccattttaatcggcctgcctgtaggcgtgttactgtttgtctcccggcgcaacggcctggcgccgatgccgaaactgaatgcgctgctgggggcgattatcaattttggccgatcgctgccgtttattgtactgctcattgcgctgatccccttcacgcgtttgattatcggcaccaccttaggcagcaccgccgccgtcgtgccgattaccatcggcgcttttccgttcttcgcgcgactgaccgaaaacgcgctcgacgaagtggattacggacgcattgaagccattctgtcgatgggggtaatctgtggcacgttatctttaaatcgctgctgccggaggcgctaccgaccctgcttgccgggatcaccctgactatcgtgatgctgattggcttttcatccatggcgggcgtcattggcggcggcggtcttggagacctggcgattcgctatggttatcagcgttttaacgatcaggtgatggtcggtacggtgctgattctggtggtgatggtccagggcgtacaaatgatcggcgacaggctggtacgacagcttgcccatcgccgctaagctctcattctcaggcggctactgcaggccgccttccttcacgagaaccctgaccagctctgccgccggcatttcgcggatcatcgccaccccttgtcccgcccagtgcgcgccgaaaccatgatcgccctgcgcttttgccgccgtcgccagcgcttttccggcgtcataagcgagcggataggcgggaatttctccttcgccgatttcgtgccagctatttttaacgcagcgtgctggccgacccgaaatagccgccgtcaaaaaggtgacaacgtcactattttgcgtgagcgcctgtcgatagccactatctatagccgcttccggacacaataaaaatgcggttcccagctgaacgcccgacgcgccgagctgcatcagactggctatcgccgccccatgcataatgccgccggcagcgacaatgggtaaatcgacggcctgctgtagcgcctgaagcagagtgaaggtgctcatttgacgatcgtcgccgtgtgggtcaaaaatcccccgatggccaccggcctcatacccttgcgcaataacgacatcaatacccgcttgcgcaattaatcgcgcttcgtcgacgcaggtggcggacgccatcgtcaccgtaccctgttgctggaagcggcgcacaacctctgacgacggcacgccaaaatgaaaactcaccaccgccggcttctgttcaagcagcatatcgagcatggattgatgttgatggaaggtctgataaatctcgttaagctgtttcggcggcgtgccgtgataacgggcaaacgccggagccaaccgcgccagccactgcgcttcctgaacggcatcgcggcgcgacggtgtatgacagaaaaggttgacgttaaagggacaatcggtgagccgtcgggtttgttcaataagcgcctgcgcctgagtaaccgtcgacgcgccgagccccaacgaacccaaacccccggcgttacttacagctgcagccagcgccggcgtcgacacccccgccatcggcgcctgaataatcgggtaacgaatattgagcaaacgcggtaaatgctgattcattgacgatcctgtgcaatttgcgatgtgaggcattaaccatctctttttaagatgctaagatcaaccgtattgtcatattgagaagaaaaatatgaaccacaccacattactgatctttaaactggtggcagaaacccaaagcgtcactcaggcagcgaaacaacttggtcgcgcgcaatccaacatcaccactcggatccagcaacttgaagaggagctggaagccgagcttttcgtccgcggaaacaagaagatgctgctttctcccgccgggcaaaacttcctcagctacgcgcggcgaattttaagccttgccgaagaagccaaactggcgctgcacccggcgcgcccgcgggaacgttaaagctcggcgcgatggaagcctgtgccgccagccgtctgcctgccgtattgccgctgtttcagcaacgctgcccggacgccgacctgacattgcgaaccatgcccacccgccagctgactgaactggtcgaaaacacaacgttggactgcgcgctggtttcactgccggccggtccggacgggagccttcaatgcccacagacgcttgaatatctcccgctttttatcgaacaactggtcctgatcgcccctgtcgaggggcgcgactaccgttttgccgccttcccggcaggatgttcctaccgccagcgcggcatcgagtatctgcagcagacgggagcacaggtggacatcgtcgatgtcagctcctatcacgcgatgatggccaacgtcgccaccggccgctacgcctgtttgctcccggaaagcgttctggccctgctcacgctacccgcaggctgccagacgcaatacatcacccaggccgccacccagcttatctggcgccgcgggtatgtatcgccgattctcgacgtcctgcgccagttattgctggcgccggtcgcaggcaaccagcccggcggctcccagcaacacgccgctggccgtcaatagtgaagggttaaacgatcccgtcaggctgtataaaccatcggcgaccagcggcccgattatctgccctatgccgtaagtcgccgttagcgcggcgatcatattaaattttaccgcctgatttagccgcttgccctctgacaaggcgatggttaccgacccaaggaaggtcgctccaaccagcagcgcgctcaacaaacaaaaggtgaatgagtggctccacgccggtaaggccacgccgaaggcctgaataacgagattgctacaaaatgcccgctgatagccaattttcagtacgagttggtgccagataaaacaggaaggtaccgccgcgagaccaaataccgcccacaggtgcaccgggtcgatacccgatagcgcgccgtgcaaaaacagcggcaaataggtcgcggtgatgatgtagccgaagcccgcgaggccataaatcagcagcaattttaccgcatcgctcgtgcgcccattgtcgctcggcatcgttgttgcgggcccgctgtttaacgccagcagcgaatccgccgggcttaataatccgcgcaaggcgcataaaaacagcaccgtcgccgtgatggcgcacagtagccagatttgctgactgctaaacgccagcgctttaccggcggcaataaactccgccgacagaaagatccccattccgaccccggcaaacagcaccggcgcgccgttatgatgtttcatatgttgcagtagccataacgaggcggagataagcgttaccgcgctgagtaccccggccaacccgcgcaagatgatgatagccagtggcgaacgcagccaggccagtagcgccagacaaattagcgtcagaatgaccgagacaatattcattctggtcgcctgctccggctttgccttcgccagtaacaatgcccccagcaggtacccggcataattagcggaggcggccagattcccctgacgcagcgtcaggatctgatcgcttaacatcaccggcaggatcccggtgaaggcgaagcggccgtaacccataccaatcattaataccgtcgcccctgccagcgctaataagaaagcgtttatctccggcctgctttgtcgcatctccgttaccccttgcacaatttaatctcaaaaagagaatgtttttcaattttaattctctttttattatggaatagcatagtgcgtcgagcaagtcgtcgcgctaaggcaaagagtaaaagcatcagccacaagatacttcgattagagacgaaggatggttgtcaaaagcgcactgccgttaaacgccgtactcgataataggccgcattatcttcagcgcagcgctcagtttatcgaggctcggcgacgccagcgccagacgcaaagcatgcggcacatcacgaccgacgctgtacggttcggcggtggaaatagcgatattcatggttagcagctgtttcacgacgcgatcggcgcggatctcctcgcccaacggcagccaaaggaaccaggcattttcattgccgatcatcggtaagccagccagcgcctgacgggcgatggcctgccgccgccgcgcatctgcgcgcattatagtttcgagccgggccagcgtcccatcctggatccagccgcagaccagcgccgtcgttaaggccggcgtattccagctggtggcgcggatcgtccgctctatctccggcattaacgcttcccggcataccaccatgccaacccgtaaaccggtggcgatgttttttgaaaaaccgcacacatagaccgtacgctcaggcgccagcgacatcagcggcggcggcgcgttgtcaatcaaccacgcataggcggcatcctcaatgatgaacaaatcgaactggcgcgcaatatcaaccagttgactacgctgcgccagattcattacccagccaagtgggttatgcagcgtcggcatggtgtaaatcgcttttacccgccgtttttcacacaggctgcgaagcatatcgagatccggcccttgtgttgtgtgtgggatagcaaccagttcgagttgatagagcctggcgagggcgcgaaatcccggataggtcagcgcatctgccgcaaccacatcgccgggacgcagcaggccgccgagcgtgaccgccagcccatgctgagcgccgttaacgatagcgacctgcccggcgctgaccgcaataccctgtctgttaagatgctgggccactatttcccgttcgctcatgcgtccggcgtgcggttgatagcgtaacaacgcctccagatcgcccgcgccagacagcttttttaatgcctcgcgcaggagaacggtttgttccggcaacgccggagagttgaaattaagatcgatcatatccggggcaatggcgtgctgatcgacacccagccccggcggcaagctcagttcacgcacaaaagtgccgcgtcccgtttcgccgctgaccagccccattaacgccagttcactgtagacccgcgtcgcggtagccagagaaattccgtgttcaacgaccaattgccgatgggtcggcagttggcagccagccgccagcgtaccgctgcggatggctgccgcatagcgatcaaccagatatttatagcggtttttcatcgtcattgtatccatgacaattatttgattgtcatggattgtgcgacctactatcgacccggtcaaccacattaactatcactacaaagaggtcacacgtgcataaccgtcgcgcttccacttctatatccggttggataaacggttttatcggcgtcgctatttttagcggctcgctacccgccacccgcatcgctgtgcaggagttcgatccttttttcctgactttctgccgcggggcgattgccggggtgcttgcgctgggcctgatctggcttttacgcctgccgcgcccgcaagcgggacaatggcgttcactggcgctggttgccggcggcgtggtcatcggctttccgctgctgacggcgctggcgctgcagcgggtgacgtctgcccactcaattgttttattgggttattgccgctagcgacggcgattttcgcggtgatccgcggtggtgagagaccgcgccctgccttttggggattctcgctgctgggcagcatgctggtagccagtttcgcgctggccggtaacaccgggatgtccatttcaggcgacctgctgatgctggcggcggtagtggtctgcggattgggttatgccgaaggggcgcgcctcacgcgagagcttggcgggctgaccgtcatctgttgggcgctgctcctgtccctgccctgatgatgctagcctgcgggttaacgcttcccatcagtttccgaggtatcagtccgtttgcgtggaccgcgctggcctatgtctcgttattcagcatgctgataggttttatcttctggtatcggggactggcaatcggcggtattgcggcggtcggtcaactccagctattgcagcccttttttggtctgtcgctggcggcactgctccttcatgaagcagtgagcttgttgatggtcgtcgtcacgcttggcatcattttctgcgtgatcggttcgaagcgctttgcccgttaaagattgcagcctgatttgaggcgtgttcctccatcaggctgtctttatcatcaattaaactgtggcgcgaccgaatggccacaggcgctgttagcgtcaatggtgtcgttcatgcaggtctgcgaatcaaggccctgacccggcgccatccccaaggatgatgaggaacctcctgaacaggcggatacagcaaaaacaacaagcaatatgagtaattgtttcatcgcgatgacctctgggaagcaaatagattgccgtgctccattctaagactggccactcatccatttccctttcaaactcaggtatcactctaagaaataatattggcgttatttatcatctgtatagctatattatcggtcattttgccaataaatgaaccgagcattggcataaaatgctcgcccgctcgccgtggccaccgcgcttgcgctatgcttatcctccctttcgttttaaacacttagcgttatgaccacttctgtcagcaccactcagcttaacctgcgaattatttccatcgtggttttcacctgtatctgctatctctccatcggcctgccgctggcggtgcttcccggctacatccactatcagctcgggtacagtacgctaatcgccggagtcgttatcagcctgcagtacatttcaacgctagtaagccgtccgcatgctggccgctataccgatatctgggggccaaaaaaggtcgttagcctcggcatcatctgctgcatgttaagcggactcttcaccctcgcggcggtgatgttgcaagctataccgcttctcgccgtcagcgccctgttgattggccgggttttcctcggcgtgggagaaagctttaccgccaccggggcaacgttatggggcattaaaaccgttggcgcgattcacacctcgcgggtgatttcatggaatggcgttgcgacctacgtggcaatggccgtcggcgcgccgctggggtaatgcttaatagttattttggcatcagcggttttgccgtagtggtagtgctggttgcgctaattggcctgctctttgcccgcacccgccaggatgtcagcgtaaccgccggagtgagagcgccgtttcatgtggtagtgcgcaggatctggccctacgggctggggctggcgctgggtacagtcggttttggcgttatcgccacctttatcaccctctatttttcggctcaccactggcaaggcgcggccttcaccctctctcttttcagcatcggttttatttgtatacgcctgatccttggcaacaccattacccgctacggcggcgtgccggtgtcgcttgtctgcttcgtagtggagtgtcttggattattgattatctggcaggcgccgtcggcgtgggtcgccggtattggcgcattcctcaccgggtctggtttctcgctggtctttccggcgctgggcgtcgaggcggtgaaacaggtagaagaacaaaaccagggtacggcgctgggcacctattcagcctttctcgatttggcgctgggtttgaccggcccggttgccggttgggtggcgggttattatgcgcttgatacgctgtatctgctggctgcggtggtcgtcgccatggcgtttatcctgctgcttcgggttcgtctgcaacagaccaggtcgaacgtatgatgtatgccgattaatcatgatactggtaacaatttaatcaataattgacgacgctttaatatccgtgccaccattccgcgagcatccagtcctggatgccgggcggtacgggtgcagtgatagaggtcgtcaacaaaacgatccccccgtgacctggctccattcgactcgtcgcctgatgcggcgagtggcttaccctggcgggaaataccgacatgcatcaaagtttcaaccagcgagtccatttttactactgcattctggtcgcgctgaaaatccacgtaaaaacgaaaaaatcgggcggagcgagagggaaaaataactttcttctcaaatggttgcgtaaagcgcaggacaacaacatctttcacccggatatcaccagcgaaatcgaatggctgcgtggcaaaattatccaggccggtcatgatacagaccttgaaccgatgctggaattcgtctatgccaccgcccggcgcgccgaaatgctcaaagatgccgactgatctttattaagctagctgcaaaatatcccctgtagccggcgcctgtgcgccggcgagccacagttttccccaggcgccggtacagtggcaggccaaaattttctccacctgcagctgctgtaagtaacttcggacctgccaaaccctggcgacggatgcggcgcgcaggtgtagcccgccgatcaacgcgtggacccgctcaatgccggttatattctgacaatgccgcacaatgttctctacgccgcgatgtccgcagccgcagatgatgaccagaccgtggtcggagagataaatcaggacgccttcatcgacgatataatcaggcgtcaacggcgtgctggctaatacgccaaaggattgcggacggtttaccacgatctcaccggaccacaacagacgttcgctgatggcaaacggctgacggtagcattccatgcgaaagcgggaatagtcgagctcaagcgagagttttttgattttgcgtacgtgccggccaaagctgatagcggcatatcgaggttgggtaagctgtggatgacaaataatccggcttccctccggcagccaggggacgccgccgcagtgatcgtaatggccgtgtgatagtaccgccgcggtcaagttatccagtttaatccccatcctctgcgcattcttgagaaaactgccgtccggaccggtatcaaacagcactttgctggtttcatcttcaaggagcaggctaagtccggctttggctgtcaacgccggatcggcgtgcgctgcaaggcgattttccagtaataccctgatggttaaggccattatttcattcatccctgttatatatgcactaccagtgtaacgaagaaaccctgcaatctgtgtgatgagcgccgcacccttcgccccgaaaaaaagtgacactgtcactgaaaaacagcttcacaaccgcgctacgtcctctatgctgatagacgcggaccgttaacttgaggttatctatggcagactggaatccctcgctgtatctaaaatttgctgatgagcgcacccgaccggcggctgaattaacggcgcgtattgtgcaacagccggtcaaactggctgtggatctgggctgcggtcctggcaatagcacggccttactgcgtgcagcgtggcctgaagcgcgaattattggcgttgataattccgccgccatgctggcccaggcggcgaaagcgcttcccgactgtgagtttatcaccgcaaatatagaagactggcagccatctgagcccgcagacgtgatctatgccaacgcctctttgcaatggctcactgaacatcaaacgctgttcccgcgactggtcagacagttagccaatagtggggtgctggcagtgcagatgccggataactggcaagagccctctcataccctgatgcgtcaggtcgctgaagagctgggatttccggaaagcggccgacagccgctccccagcgtgcagcagtattacgacatgcttaccaacagcggctgcgaggtggacatctggcgcaccacctattatcactctctggaatcacaccaggctatcgttgattggctgcaggcgaccggtctgcgcccgtatctgcaggatcttgatgaagctgaaaaaaacgtgtttttagaacgctatctgacgctgttacaacaacattatccgttacagtgtaacggaaaggtgctgttattgttcccgcgactgtttattgtcgcgcgacgcctggctaacgcgtagtcgccagttcgacgtcaacgttaagcgcaatcagttgatttactacactgctgctcagcccgtcatcgctgatgatgacatcgagctcgctcagcggcaggatcaggtaattcgccatttttccgtattttgatgagtcgcttagcaggatacatttttcacttaccttcgcgacggtctgttttacgatggctttattttcgttgggcgtagacagtccgcgcaaattccacgatgacgccgaaataaacgcgacatcgataaacaggttctccagcatttgcgccgtcaggtggccaacggtcgactgattctcacggcataagcgtccgccggtatggatcaattcacactgcccgcgttcaatcatcaaattggcaatggcaaaatcattggtgactatcagcaaatccttgcgctcaaccaggttttcggccagcgcgagcgtcgtggtcccggcatccagatagacggtactgttggcaggaatatgcttaagcgccgtcaggccaatagcttccttttcctggggaacatcagagtcttatcgcgatgcgaaggttcattcagcaggcgggttcgttgcggtagtgccacgccacccgatacgctggccagcacgttaagctgctccaggcgctgaatatcgcgccggattgtcatatgcgacacgcccagcgcctcgaccagttcgacgacgctgactacccctttgtctttaatgatttccagtatcttctcttgtctttccaacggcagcatcgatttctcctgatggtgtctcgctatctcatattttcacattttatcacatcgcattgggctgtacaccggattaacagcgtcatcgggtgtgaaaaatagataataaatgttatttattgtgattaagatcgctgtattcatcacgtcaatcattgatattaacatttaacaacagataataccgtaaattaacactcgctgtatgaaggggacaggatatgagagcaggcataattgccgatgattttaccggcgcgacggatatcgccagttttctggctaataacggaatagcgaccagcctgtttagcggcgtcccggtgaagattaccagggtggtgctcgcgcattagtcgtgagtctgaaatcacgctctgtaccagccgaagaatctgtgacactgtcactgaatgccctgtactggctgcaacaacaggggtgcgatcgcttttattttaagtactgttccaccttcgatagcacgatcaaggggaatatcggcccggtaacggatgccttaatggatgcgctgggcgtcgcaaccacgattatctcccggcgttgcctattaatggtcgtacggtgtatcagggacatttattcgtagaagaccgcctgctacaggagtccggtatgcgcaatcatccggtcaatcccatggatgatagcgatctgcgccgtttgatggagcgtcagtcacgcggtacatgtgcccttatcaatgctcagattctggagtccggcgaggcggccgtgcgcgacgagatccaaaccctatccgccgcgggctatcgctatatcgcgctggacgcattaaacgataaacatctgcaaattcagggacaagcgctacacgatatgaagctggttaccggtggttccggcttagccgccggtctcgcacgtagttgggccaatgccacggagccttcccttccctttagcgtcaccacgccagcggcctgtacggtagtattatccgggtcctgttctatgagaactcaggcacaggtggaaaaataccgccaactggcgccaacgctggccgtggacgtggctggtttgcttgataaacgctggacgcttgatgagtattgcggtcagatcgttgaatggctgcaccagcagtccgacgcggccatggcgccaatggtttacgccacgacgtcagtcgcagagctgcacaacatccaacagcgctttggcgccgagccaagtcggttgatcgttgagacgctgttttctctgttagcaaaacaacttgcgcagcaaggcgtgagccggttcatcgtcgcgggcggagagacatccggcgcggtaacgcaagcgctggatatacgccatttcgctattggcgccgcggtctcacccggcgtgccgtggattaaggcagattcccgaccgcttttcctgctgctcaaatcgggtaattttggcgatgacaatttctttgcccgcgcacagtccgcggaggtttgcgcatgaacgagtcctccttacgccaacagatggtggctatcgcacgctctttctttcaacgcggctacgcaaccggttcggctggcaatctttccgtccagcttgctgacggcacgattctggccacccgacaggctcctgtcttggcgagcttaacgccgaagaattatcgcacgtgactctgagcggcgaattgctctcggggttaaaaccctcaaaagaggtgagttttcatctcgcgctgtaccgcaacaatccgcagtgtcgcgccgtcgtccatctgcattgccattacctgacggccctatcctgcctgcaggatctggatccggcgaatacacttccggcctgtacgccgtatgtggtcatgcgggtcggcgaaataccgctggtccctatttccgccctggcgatccgcagattggccaatggctgggtgaacgcgccgcgcagcataaggcttttttactggctaatcatggtccggtggtggtgggcaaatcgctacgcgatgccgccgacaatctggaagagatggaagcgtccgcccgcctgttcttcacgttgaaaaacagcccggtgaactatctcgatcatcaacaactgactgtgcttcgaggaatgcaataatgttgaaacttgctgccaatttatcgatgttattcggcgaatatccgcctctggagcgcttctccctggcggccagggccgggtttagggccgttgagatgtggttcccctacgaataccccgtagcgaccgtcgccagcgaattagagaaacatcacctcaagcttatcggcattaatactccggcaggtgataccgcacgcggcgaatggggattatcggctttacctggccgtgaagaggaagcccgtaaagcgattgatttagccatacattatgctgcggctctgcagtgcccggcgatacatgttatggcaggcgtcaccgaagggttcgatcgacagcaatgtgcggacacgtttgttgacaacgtacgctacgcggcggatcgagccaaaccgcataacatcaccattttgcttgaaggtttatcgcccgccacccgtccggggtatttattttccagtcaatatcaggcgatggaatatattcgccaggcagaccgcgacaatattcggctgcagcttgatattttccatgcccagcaggtcgatggcaatctaacttatttattgaaaaactataaagagtatatcggccatatccagattgcatcggtaccggcgcgccaggaaccgattgacggcgaagtggattatcaatggattttcgccgtactcgagcaggaaaaatatgatggttacgtcgccgcggaatatagtccacgcgcagggacgcaagccggactgcattgggcgcaagcctggttaaataactaaaacctacataatatcaatgcctcagtgagcgccgatgcgcgctcatttttcggagatagaactatgtcaaaccactctgcgttgagcctggagggcgttgcgcctgccataaatgaagagttagtgtggaagaaagtcgtccgccgcacgctgcccttattaatgatttgctatattttggcctatcttgatcgtgtcaacgtcagtatcgctaaattacaaatgtcgagcgatctggcattttccgacaccgtttatggtatcggtgcgggtatatttttcatcggttttttcttttttgaaattcccagcaatatgatccttcatcgttttggcgccagacgtttacttggcggtttacttatttcctgggcactcatcgcaccgctgacggcatttgtgcgcacgccgctggagttttataccgtgcgcttctttttaggcgtggcggaatctggcttttatcccggggtaattctgtatctttccttctggttccccagctatcgccgcgggcggatgtttgccctctttgctaccgccgtaccgctttctgggatcctcggcgctccgctttctggctggattatgggccattttcatgagtacggcggtctcgccggctggaagtggctgtacattatcgaaggcgcgccatcgctgctgattggggtgctggtgatattcctgctgaccgaccgcattgcgcaggcgaaatggctatcagatgacgaaaaagcgttgctcgaggcacgactgcacagcgatggcagccataagactgaacagcatggttcgatgctggctgtactgaagaatccgaaggtgtggttactgacttttatctatttctgcctgattgccgggttctataccgtcagtttttggatgccaacgctgattcacaacgccggtgaaggcgatgtgctcaaagtcggattgttaaccgctatcccttatgccgcagcgatagtcaccatgattgccgcgtcgcgtagcgccgataaacgtagagaacgtcgctggcatctcgccgccatcgccgtcatgagcggcctggggatgattattgcggcgcttttcagccacgatttggtgattgcgatgatcggcttaacaattggcgccgcgggtggattgagcacactaccactcttctggagcctgccgacggccttccttggcggcgcttccgccgcggtcggtatcgcggtaatcaactcctttggcaatctcgccggctttgtcgcgccgtggatcatgggcctgctcaccgatatgacccattcgacgctaaccggcaccttaatcatctccgcgacgctttttatcggcgctgctgcgatattccgtattcctgcccgtatggttaaccattaataatattgagaaaatcaccatgaataataaattaacgattgccgtcaccggcgccgccggatttcttggcacccaactggtcaaggcgctgcttcagcgtggctcattgaccggcccgcaggacgaaacgcaggaaatcggtagactggtcgctatcgaccgcgtggcgttacaggggattgacgatagccgtttacaggtattaaccggcgacatcagcgatagcgaatggttacgtagcgcgattcccgctcaggtcgatagcgtctttcatttagccgccatcgtttcaagccaggcggaacaggacttcgagctggggatgaaaatcaacgttgatgccttccgccaactgctggagcacctgcgtcagttgccgcagagcgtcaaactggtgaccaccagttcggtggcggtattcggcggcgacttgccggaaaaagtgagcgattcacaggtatggttgccacagagttcttacggcacgcaaaaagccatttgcgatctgttactggcggattatagccgtcgcggttggcttaatggcagaagtctgcgcatgcccaccatcgtcgtgcgcccgggaaggcccaatcaggcggcatcgagttttgccagcggtattatccgcgagcctctgaatggagaatccgcggtttgcccggtcaaagcggatacccgtctatggctattgtcgccccgtaacgcgattaaggctttaattcacgggcacgaactggctgaagcacagttgacggacggtcgggtgattaatctctgcgggctatcggtcagcgtcgaacagatgatcgcggcgttgcaccaggttgccggcagtgaagtcgcgcagcgtattaccttcacgcccaatgccgccattgaacgcattgtcaattcgtggcccggtgatttcgacacgcgctatgctcaacgtcttgggtttagcgccaaccatagcttcagcgaaatgattgaagagtatatggcggattacctcagctagggtcagtatcagcggcgcctgacggcgccgctgcatgttaccaggggaagtcgtgaaccagcgaaagatcccaggcggtggccagtaacgacagaaacatgattagattaacggtagtttcgattcgtttttccatgctgcttctcctgtgtcgcacagctagagcttcatcagataccgaacataatcgtccgcaggggtgaattcatcatacagtcggcgtgcaggattatcgtgacgggtgtgccagtacagccgcgaccatccctgattttcaccttcagcctgcagggtttgaatcagcgttctcgcgactccccgtccgcgtgcttttggcgcgacaaacagatcttccaggtaacagacaggcgtcgtcacccaggtgccttcgtgcagtacgcagatagcaaaccccagtacctcgccatcaaccacggccacccggccgatgaccggagactgcggatccagcagacgccgccaggtatgttcggtgacggtttgcggctgcgggctattatagaactgcgtgtacccctcccataacgctcgccaggcgctgtaatcccggtcggcaggttcacgaatatcgatattcattaatgggttctccgcacgctaaacgtcgtcgttaagtcattattttgctttctgaaaatgacttcaagcgccgagtgcacatttcatctttttcctccctactaagcgatgcgggtatggcgttactgcaacggctgattgttaataacaatcagaatgttgtaactaatgaaagagttaacccggcaatatgccgggtcatctcagtgtcgcgtgttagcacaacggttttacggcactgcgcatgccggcacgtaagatagcatccagatcggccgttacctgcgccgtcagccccggcacctgcgtcagatcctgctgccagtgcgattctgccgacaacaccgacgttaccaggtcctgcgtgctaagcttgccgtcgcgatgctgcgcccacagcgtctgaaaacgttcgatccactccgcgtcgtcctgaaccgggtagacttcaccgttacgctcaccgcggtagaaggcgatcaatgccgccagcgcgaaagtcaggcgcggtgggagcttaccgctctgcttctgccctgccagcagttgcggcaggatacgtgtacggaacttggtcatgccattgagggcgatggataacagttggtgtttgatataggggttgcggaagcgtcctgttaccgcgctggcgaacgattcaagctcatcgtgcggcagatcgagaaccgggataatctcctgatatatcgctttttcaacaaatgagcagacttccgcgtcgttcatcgcttcaccgacggtgtccagacctgcctgccaggctaccggcaccagtgcggtatgcgcgccgttgagaatcgctaccttccgttctttatagggtttgatatcgtcaacaatcagcacgtttagcggtaatttatcgaggcgcaattcggctgccagcgatttcggcccctggatcacaaacaggtaaaagtgctctgcggtatcaagaaaggcgtctttatagccaagctgcgtttcaatctgctccgcttcatcacgcggatagccggtaacgatgcggtccaccagcgtcgaacagaaggtgtttgcctctgcaagccaggcggcaaaggattccggcagcgcccactcacgcgcataacgcagcaccagttcacgcagcgcctcgccgttataatcaataagttcacaaggaatgataacccagcctttatcagcggcgccggcaaaatggctgaaacgctcatatagtagccgggtcagtttcgccggataacttaccgcgggcgcatcgtcgaaacggtcgcccgcatggtaactaataccggcctcggtggtgttggagaagacaaagcgaatatccggattgtgcgccaggcgcagaaattcatcgtaatcgtggtaggcgctaatttcgcggtttactgagcgaataagacgcgcatcgctaaccgcttcgccattttcattcagcccgcgaataatcgtggtgtaaaggccttcctgggtactcagcgacggtgggaaatcgctggcgatgggtcggacgatgaccacgccagcattcaggtcagtatgctcgttaagcagatctatctgccagtcaacaaacccgcgcaggaagttaccttcaccaaactggatgatacgttcagggtactgcgcgccggggaaatcacgacggtttaaggttttcacaatgggttccctcttagagtagtcatacaacctgagtaattggtccaataagttatcaggttttatggttggcgaaaccccgttttgatcaaacctcttcgtattaatctgctgtcgggaggatcttatagaacagcgaggtacccgacatttccccgtcaggcattaaggcaaactgcggaatttccccgctttttgccagccgctctgctgatagaagcgctctgcgccgcttccggtcgcggtatccagcaccaacacggtttttccctgagccagagcaatagcctcaagctcgctcatcagcaacccggcgatcccctgtcggcgcgcattttggtgaaccaaaagcttggcgacatcggcgcgatgcggctggttttccggctggtcgataatcaactggacggtccccactatctgccgttgttggttttctgccgccagcacaatccgctcgccagcggctacgctttgcgccatccgctgccagaaacgctcgccggtgtccggcgaaaacggctgcataaaactgaccgaagccccgccgttaacgcaactggcgaggatttcatttaattgaggaaggtattcaagaatagattcacgcgtcagcgtgcgaagtgaaaaggatgtggccataggttgctccctgaaaatgaccacatcactatgtttttaactaatatttaactcaagcaaaaagaccatcggattttcttatcacacgccgtcaggcagcgcctgcacgcaaacacgattgcgcccggcctgcttggcgttgactaacaggtcatccgcttccattagcagctgattaaactgctcggcgatccgtccttcaccgacttcacggcactgcaggccgagactcaccgtcaggcgaatacgctgctgccccaggtgaaagtttccgactcaatcccctggcgaattttttccgccagcagatgggattgttgagcattatcgagcagcgccgcgacggcaaactcttccccaccgatacgcgccaccattccctcttcacccgccagttcacgtacgcgctgggcaaactgggccagcacgcagtcaccgcattcgtggccccaggtatcattcacccgtttaaaaccatcgatgtccagcaccatcacagagagctgtttattcgcctgcggcgcctggcgtttcagcgcctcgcccaaaccggaacgagagtaaacccgggtctgaaaatcgaagtcagcacgcagcgccagctgttttaccaggttgttgatagcctcaacgctggtcgccacgatcaccgggcttatcagcatcgccgccatgccaagacgtgttgaaaacagctgccacggctgcggacgcgcatccggcgacagatggataagcgagttcgccaccagcagaatctcagtgataccggtaatgaacgtcaacaggcaggtcagcggcaacgggtagcgaattgcgcaccagatcagcgccggcagcgggaaagtcaggcttccggcgccgcctaccgccaccccaagcgccatcgatagcaccagcgctatcaccggcagtagttggctaaagcgaaagcggcccagcaccgatggtagcgtcaaggtcagaataaacggcaagatgagtaccgcggtcgagaactgctcgctaaaccagtccgccagttgcggaataaaagtcgcccgttcaacatcaactgagcccaacgcgcctaccgcggcgcacaccagagccgccagcaggcaataacaaaaaagattcagagcgttaattggccccggcatcgaatcggcgcgccgcttatcccacagcaccagttgcgccagaatgacgataaagacgatatttgagaagttaatcagtagcgacgcaaagcccatgccccaacgggaagtcaggccgtcataaaccagcatcgcggcaaaacagatggcataaaaatagctgcgatttagccagacgtagcgcgcgaaaatacctgccatgacggcattgagcggccaaaagaacgagagctcctgcaccagacgcagcatggcgcccataaagtgcagcaggatcgtcagcgtgaataacaccagcgcatcgcgcaccggttgatcctcgcgaaatagcgtgaatgaccgaatcgacagtgaagacattcagtaattatccgtctaattgtttcaggcaattattatgtaaataattagttagcggattatcatagcatgagaatatttgttaggcatactgccatgccttagcgtgacaggttaacggcgagtaatagcattcatttccatgaccagccaatggtgaatcacctgtaccacgtaacgctgctcctcgccgctcagttcccgcccgcgcgggatcgcatgccatttttccaggcatccgcggcagcaggtcgccgtagcgtgctgggcgataaataccgggtgcccgcgcatcggcgtctgcttaccgtcattagcaatctgcgccggggccagtcgtttggcgataaaatccgccgcgtggctgtcgataatctccggccctttatcataacaatattgccgctctttcacccgaggtggaaacgagagcggaacgttgaacgcccaagccgggcgaacagattttccattgcagacatcagaacaccgatcttcctaaacgttgggtgagtttttccagtaaggcgattcccgccagcgagttacccgcttcatcaagttcaggactccacaccgcaatcgccatctcctgcgggacaatcgccacaatgccgccgccgacgccggattttgccggcagcccgacgcgccaggcgaactcgccggcattctgatacatgccgctggtcatcatcagcgcgttaacctgccgcgactgaatcggcgcgatgaccgggtccgccagatgcggggccatccccgatcggcgagaaacaggaaagtccgcgccagctcaacgcagctcatctccagcgagcagtagtggaaatagttttgtagcaccgtggcgacatcattatggaaattgccgaaggatttcatcagccaggcgatggcggcgttacgcgcggagtgttcgaactcggagcgcgcgaccaccgaatcataggcgatatcgtccaccccgctcagccgacgcacgatctccagcattctctgacgcggcgcgctcaggcggctttgcagcatgtcgcagaccaccaacgccccagcgttgataaaaggattacgcggtttgccctgctcgatctccagctgcagtaaagagttaaagggctggccggagggatctttaccgacgcgctgccagatctcctcttcctgataatggttcatcgccaccaccagactgagcaccttcgagatagattgaatcgagaaacgttcgtgggcatcgccggcgctatagtgctggccgtcaaccgtacagatggcgacccccagtttattgccgctgacgcgcgccagggctggaatgtagtccgctaccttgccgcgcccaatcagcggcctgatttctgccagaacggcatccagcattgcattattaataaccgtcgccacactcggctccttgcccaccatcgaaattcgggtggcgagtatagcagagcgcgacgacggacgtcaggcgataacgtcgattagcggcggtctttccatacggtttgaatattgcagaactcatgcaaaccgaaatgcgacagttcccgaccaaagccgctcttcttcacgccgccgaaagccactcgggcatcgctggcgctatagccattgataaacaccccgccgcactccagaccacgcgcaaaacgttccgcttccgcgctacttgacgtaaagacggttgccgaaaggccaaactcgctatcgttagccagttcaagggcatgcgccgcgtcgcgtgcttcgctgatggtagccaccgggccgaaaagctcctgacggaaaccggtcatttccggggtaacgttggccagcaccgttggcgcgtaatagttaccggcgccggcgattttctcgccgccaagcaataacgtcgccccttccttcagcgtggcttcaacctgctgatgcagttcatcgcgcagatcgaaacgcgccatcgggccgatgtaattttgctcgtcgcgcgggtcgcccattttcagcgccgccacggcggccacgaattttttgctaaaggcgtcggcaatacccgcttcaacaataaagcgtttcgacgccgcgcagacctgtccgctattctgataacggccgatgacggcggcttttaccgcttcatccagatcggcatcgttgagtacgataaagggatcggaaccaccaagctccagcacgcattttttcagcgctgcgccggcctgagcgccgattgcccgcccggcgcgtacgctaccggtcaccgtaaccgcggcgatacggtcatcattgatgatttgcgagaccccttcattggtcgcgttgatccaaccaaagacgcccgtcggcagacccgattccgcaaacagttcgcccagcagctgcgcgctgcccatcacgtttggcgcatgttttagcagatagctattccctgccagcagaatcggtaccgcgccgcgcagcacctgccagaccgggaagttccacggcatcaccgccagaatcggcccaagcggacggtattcaatcaccgctttgttgtcttcgacctgagtagtttcagtcgccagcatcgccgggccatgttcggcataccagtcgcagagattagccgatttgctcacttcgccgcgcgcctgggcgataggcttacccatttcaaggctaatcatttgcgcaagctcttcgccgcgagcgcgcattgcgctgccgactttacgcagcgcggcggcgcgatcggcgatcgctacatggcgccactggcgaaaagcctgttgcgcctgggcaatggctgaatccacttgttgttcggttgaccacggcagagacgacacgacttcaccagtggtcgggttcacggaaaccgcatgggtggcagataaattcatggtttttctctctgtagggattgcgaagtgtggatattgtggcctacccttcttttcattgaaaatgaataatattaagcaacacattcacaaaagaagaatgctatggaccttacccaacttgagatgtttaacgccgtcgccagtaccggcagtattacccaagccgcgcagaaggtgcaccgcgtcccgtcgaatctgaccacccgcattcgccaactggaggccgacctcggcgtcgagctatttattcgcgagaaccaacggctgcgtctgtcgcccgccgggcacagttttttacgctacagccagcaaatcctggcgttagtcgatgaagcacggatggtggtcgccggcgatgagccccaggggctattttcccttggctcgctggaaagcaccgctgcggtgcgcatcccaaccacgttagcccttttcaaccagcgctacccgaagatccacctggcattatccaccggcccgtccggcaccatgattgacggcgtcctggaaggtgcgctgagcgcggcgtttgtcgacggtccgctggttcatcctggtctggaggggctgccggtcttcccggaagagatgatgatcgtcgccccttatggtcatgaatcggtaacccgcgccagcgaggtcaacggtgctaacgtctacgcatttcgcgccaactgctcctaccgacgtcattttgagagttggtttcacgccgaccgcgcgacgcccgggaggatccatgagatggagtcctaccacggtatgttagcctgcgtgatcgccggcgccgggctggcgctgatcccacgcagtatgctggagagtatgccaggccatcagcaggtttccgcctggccactcgcagaagagtggcgctggctgacgacctggcttgtgtggcgacgcggcgcgaagacgcgccagctggaggcatttattgaattgctgaacgaggaccgtcaggcggcaagcgcgacatgatggccggacgttaatcggcgataatcagccgcggcgagagttcctggagcgcatcacgagtttcccctggcaaatgcgcatcggtgatgatgtccgtgagtgagtcgaggtgcgcgatattgaacagcgaccaggcgccgtatttcgaactgtcggccagcaggatccgccgccgggcgttggcgatcagatcgcgcttcagcgccgccttctcttccgtcggcgcggtaatgcccttttgcaaatcccaaccgttacagctgacgaatgccagatccggccacacattctgcagcaagcgtcgcccatgctcgccaatacacgactggctgctgtcatcgatgcgcccgccgataatcgtcacttcaatctgtttgaattcagccagaaacagcgcgatatgcagatcgctggtgatgacccgcagcggcagatgcgtaatctgtcgcgccagttcaatcatggtggtaccggcgtccagcacaatggcatcgccggccttgataagcgacgccgctgccctggcgatggcgtacttttcctgtggactacgctgcgctttttccagcgtcgtcggctgtgtgggaataaatcggttgagcgtcacgccgccgtgggtacggctaattaccccttcctgatcgagtttaatcagatcgcgacgaatggtcgccggcgaggcgttagttaccgcaaccagttggtcgaccgttaccagattatggcttttcaggaagtccataatctgctctaaccgattatatcccttcatgttattcctgtgcgatttgcatggcgagctcaatggaggttgccatgctctcagacttcgctttacctgtccaggcaatatcaaaggcggtgccgtggtccgcggaagtgcggataaacggcagcccggcggtgatattcaccccatcataaaatccaagtagcttgagcggaatatgcccctgatcgtgatacatcgccaccaccatatcgtacatgccttcgtggcactgcatgaagacggtgtccggcgggcacggtccgacaacatgaataccctgcgcctccatggcggcaaccgctggggtgacgatacggatttcttcatcgccgaacagaccgttttcaccggcgtgcgggttcactccggctaccgcgatacgcggctgcgaataccccacgcggcgtaaaaaatcatcggcaacccggataaccgtctccacccgcgactggcttagggtatcaaggaaacgtcgcagcgcgatatgggtggagacgtggatcaccttgagcttatcggtgtacagcaccatggcataatctttagtctgggtcagatgggccagcagttcggtgtgtcccgggaaatggtgcccggccagatgtagcgcctctttattcaacggcgcggtggcgatagctttaacttcgcccgccagcgccagcgcggtggcgcgcttgatgcagcgatacgccaaatccccgccctgggcctgaacttcaccgggccgcagggcctgagggtcgcttaacggttcatcaatcacgttaatcgtcgcgggtgaaaactgcgcttctctcgggtgttcaataattcgcaactccgcgcgcggggtaatgttcagcgccaggattcgccgcagcgtctgcgcgcagcccacgaccaccaccggcgcgccgctcagttcgccttcgctcagcgatttaataataatttccggaccaatgcccgccgggtcgcccatcgttaccgcaatcatgttagacactcagtttctcctcaataaaattcacgacatcccgcagcgtggtctccgtaccgaatccccctgctttggtcatcaccggacgcggccagcgacttccgagaaaatggccgtacggcacgcattgcgccacccggccggttatatgaaacccctgcgcaccgagcgcatgagcgacggcgatagcgacatcgccgccggacagataaagcgccccgggcgcatgtaactcaacggcaagttgggtgacctgggcgagataagcgcagatccgttctcccagcgccgcgcggctcaacccgcgttcacagcactgcgcctcaataccgtaccgggcagcgctgtccgcgcaggtggtaaccacgcaatgatgatttgccgccagcaccgcggcgattcgccgggcatcggccagggcgtcgccgttaaaggcgcgggcggcatcaatccagatctgctcgactcgcggatggccggccaaagcggcgacctgagcctgtgctatttcgctcatggaaccgaccacagccagcaacggcccggttgtggcccggcgcaggtagcgcgcaagcgcctcgcagatccccgcagatcccaccagcagcgtttgccgcgcacggctggctaccgcggcgataacctcatccaactgcgcgtcttcttcggcatcaataattaacactcgtggttggtcgctctcttccgcgagggcggctgccagttgctgcgcatccagcgaacggcacggcaggctgctctgcatggcgagcaattgcccaatatcggcgctactgaccggcgttttgggatcgctggcgaattctgtttcattaagcgccacaccgtggacataacatcgtccgccgcgggttatgcgccctgccgccggaaaggcaggcgcgacaaccgcgacagagcagctccgcgcacgcatcatcgcctccagttccgcgccgggattgccccgcagggtggagtcgattttcttcacctgccagacggcggcgaaatttgccgcatcacggagtactgcgttcactttctctgcagcctgcgcccggaaagcgcccgactatcgctattgaggaccaatgcccgggtggtggactgatggccggcgttaaaggccacttcaaccgccaggcccgcttccgccagacagacaccagcatcattggccccggtaaagtcatctgccagcaccagaacagggttatcgccgcagctcattctctttccttcatcgcttatttgaaccgttaatgattatattcaatcatatttgattaaatgtgagcaagctcaagttattaaacgtccgtataaattataacttttgctcattgaaatgagtgaacactaagcagattgattgaattcaatcataacaatagaggagtgggacgtggcgacgattaacagcacgattatcagcggcgcgggcgccatatcagccctgaagccagtactggcaggtaaaaagagcattttactggtcaccgatgcgaacgtcggtaagttggaagcgaccaaacggatccaacatctgctgggcgagaataacgttgatgtgagggtcgtggattccgtaccggcagagcccagccaacatgacgtggcgcaaattgttgcccaactcgcgggagcacagccggagatggtcgtcggtatcggcggcggcagcgtcctcgacgtggcgaagctgctctcggtattacttcatcccgcctcccctgcgctcaacgcgctgatcgacggcgagaaaccgcgcctgcgtctggcatcgctgctgatacccgccaccgcaggcaccggatcggaagcgacgccaaacgccatcctggctattcccgagcgtaataccaaagtgggggttatctccccggtactgctgccggatttcgtggctctgttgccggaactgaccaccagcatgcctgcggccattgccgcctccaccggcatcgatgcgctgtgtcatctactggagtgctttacttcaaccgtcgctaacccggtgagcgataacgccgccttaatcggcctgtataagctggtacggaatattgagcgttccgtgacccacccgcaggatctcacggcgaaactggaaatgctgtgggcctcgtactatggcggcgtggctattaatcatgccggtacgcatctggtgcacgcgctctcctacccgcttggcggaacctggcatctgccgcacggcgtcgcgaacgccattctgctggccccctgtatgcaggtcgtacgcccgcacgcggtggataaattcgcccaagtctgggatctgatcccggacgccgatctgaccttgaataacgaagagaaatctcatgcgctggtctgctggctggcacagctggtgaaacggctggcgctaccggacaacctcgccgcgctgggcgtaccaccagagagtattgaaacgctaagcgccgcggcgctggaagtaaaacgattaatgaacaatgccccatgcagcgtaagccaagctcaagtccaggcgatttaccagacgctgtttccacagtcatctcatcagggagaagagaaataaatgcatcattccattcgcggcgttttaaccgccattgttaccccctttaccgtcagcggtgaactgaacctgacggcgctacgccaacaggtagagcgtcagttggccgccggtaatggcatattttgcggcgggaccaacggcgagtttttcgtccttaatgaggcggaaaaaattgccgttgccgaaacctgcgtcgaagcggttgccggacgcgcgccggtggtggcgcatattggcgaagtgtcgacgcgggaaactattcgtcttggccagcagatagtaagatcaggcgtggacgcggtgtcggtcatcaccccgtggttcgtgccgctcaaacaagatgagctggtaagccactacacggcgatcgccgatgcgctaagcgtaccggtatttctctataacatcccggcgcgcaccgggaacaccattgaaccgcaaaccgcgcgtcagctggctgcgcatggcaacatcattggcatcaaagatagcgccggtagttatgagagtcttaagggctttcttaatacggtgaaggatatcgacggttttaatgtcctgaacgggccggattcgctgattcatcagggtttcgttgacggttgttcagcgtgcatttccgggttggctaacgttgcgccacgggagattaacgagatttggtcaaccttccaggcaggcgatattaaagcctccaggctggcgcaggaaaacgtcaccggcctgcgtaccgatctctacaaagtcgccttttcccccgccgcggtgaaaaaagcattgcagctgatgggccatgaggtcggcgatagccgctacgcggtgcagtttagcgcatctcaactgcagcaaatacgtggaatcatcgcgcagtatcttaattaagcgctgcgcttcttcaacaaaatagaccgggcacctgtgtgcccaggattcgtacgcccaaagagaggctaagatgaatcattttaccactgaagatacctttattattgttggcattgtcatcgcctatatcttatttaccacctggctgacgttccgtattagaagtaaaaactccggggattttatggagggctcgcgcgcgatgccggcctttattgtcggtatcttgctgatgtcggaatatatcggcgccaagtccactatcggaaccgcacaggccgcctttgagagcggcattgccgcttcctggtcggtgctgggcgctgccatcggttttccactgtttggcctgatactggtcaagcggatttataataccggtaaaattactatttccggggcgattgccgagagatacggcaccagcaccaagaatattatttccattattatgatttacgccttgttgctggtgaacgtcggtaactacgtcagcggcgcggcggccatttccacggtattaaagatcaatttaccctcgcggcgtttattaccgccatcgtcagtactttctattttgcctttggcggtatgaaaggcgtggcctgggtcaccatgctgcacagtgctttaaaatatgccggcctgcttattattatgggtttcgcgctggcaaaaaccggcggctttacgccaatgatcgagaaaatgccagattactactggacctgggatggtaattttggcgccggcacgatctgcgcctggcttatcggcaccatcggctccatcttctgtacccagtttgtcattcaggctatcagctcgacaaaaaacgtaaaatcggcgaaacgctctacctggattgcctttttcttctgcctgcctatcgccttcgcgatcgccattatcggcgtggcggcgaagtttttacacccggaaatcaacagcctgtacgccctgccggtgttcctgcaggatatgaacccgtggcttgctggattagtgacaacgtcacttgtagcttcaattttcgttagcgtcagtaccgttgccctggcgattgcctcgctggtggtaaaagatttttacgtgccgtggcgaaatccaacgccggagcaggagtttaaagccactcgttgggcctcgctgatcatcggttttctgccgcttatttttgtgctgctggtaccggaagtgctgaagctctccttctttacccgcgccatcaggctctctatcaccgtcgtcgcggtcatcgccttctatgcgccgttctttaagagcgcccgcggcgcgaacgcaggctttatcggcgcctgcgtggtgacttcggcgtggtatttgctcggcgatccgttcggcatcaataacatgtacatcgcgctgatcaccccggccctgattatggtgatcgaccgcctgctccccaataaagcgcaacaatcatccccggcccccattgaacaacgtggagtgtaaaaatgaccaccaccccaacttttgacggcgtaattcgccaacaccaacaggatcctcatctggcatgggcaatgttgccctccggctgcccgcaaaaccatgccgccaatcttttgccgctgcccgatggcacgctgctgtgcgtgtggtttggcggttcgcaggaaggaaaagcggatatttcagtctggggggcgcgtttagcgccgggcgccgcaacgtggagtgaagcgacaaagttgtccgacgatccgcagcgttcggaacaaaacccggtactgtttcaggctccagatggcgtgctgtggctgttatggaccgcgcagcacgccggcaatcaggacaccgctattgtgcgttatcgccagtcgcgcgatggaggaaagcactggggcgcgatcgccaccctgctcgatgaacccggcacctttatccggcaacccatcagcgtgatgcccaacggcaactggttgctgccggttttctattgtcgtacccggccgggggagaaatgggtcggtaacgatgatgtgagcgcggtaaaaatctcagccgatggcggcaagagctggcgcgacgtggcggtaccgcagagcctcggctgcgtgcatatgaatatcaccccgctggccgatggctcgctggccgccttcttccgcagccgctgggccgatcatatctggtacagccggtcgacagattttggcgaaagctggtcagcaccgctccccaccacactgccaaacaataactcgtccattcaggctaccacgttgagcaacggcgatctggcactagtgttcaataacatgagcgcagcaggcgccagcgagcgtcgggcgtcgttatacgatgaaatagaagatgatgacggtcgtaaagagcctgaacgcaccggcaaaaccgccttctggggtgcgccgcgtgcgccaatgaccgtggcgatttccgctgacggcggtaaaagctggccatggatgcgcaaccttgatgagggcgacggctactgtatgaccaacaattccgaacaaaaactgaaccgcgaattctcctaccccagtattaaacagggtgaagacggtaatttacacattgcctatacctggtaccggcaggccatcaagtatgtccgcgtgtcgccgcagtgggttaaaggagaaatcgcatgatcatcggtaatctgaacgccctgcctcaggcgggattgccgctggcgttgcggcaaatcctcagccgcgctgattgttctcttgccgccctgacagcccgtgaagatggtcgctttcagcctgctgatagcaactggtactgcaccatcggcaccgcgcaaacccaggcggcagaacagcgacataccgaataccaccaccagtgggccgatattcaggtcattttaaccggaaaggagacaattcatgccggtacgctgtacagcggccaacccgacgatgaacaacgcaaaccagatctctttatcagccagcagacgccgcaaagcgtcacgctgtatttgcattccggcgacttcgcggtctttctgcccggcgaaccacaccaggcgctatgcgcctttgcaacacccgcccccgtgaggaaagcggtgtttaaagtaccgcgcagcatgctggaggcgctatgaagcaggcactggtcacaggtgccagttcggggatcggcgccgcgattgtggggcaactgctggcggagggctggcaggtgctcgggctaagccgctccgcgccgccgttcgctcatgaagccttcatgcatctggcggtcgatgtgagcgaccgccaggcgctggttgatgctctgtcgtcgcttgcgccgccgcaggcgattatccatgccgccggtgtgatggcggcggcgccgctaggagaacttgacgcactgcgcggcgagacgttatggcgtctgcatgtggatgcagcgcagaccttagccaaccgctttgcgcccgttatgagccgcggcggtcggattatccttttgggtagccgaacctctcgcggagcggcaggccgttctcagtatacggcaaccaaagcggcgctggtggcgctggcgagaagctgggcggcggaacttgccgcggcgggcattaccgttaacgtggtcgcccccggcgccaccgatacgccaatgctccaccagccaggacgcgagagttcgccgccaaagacgccgccgctcggtagattgattaagccacaggaggtggtgtcgctggtgagctggcttcttagcgaaggagccgcggccatgaccggacaagagctggtaatgtgcggcggcgcctcgcttagttaggattgcccggctaagcgctgcatcagccggggaaactatcattaactttcgcgcaaatagaccgtgccgcgcagataggtggtcgcctggccgctaatcaatacgcggtcatcgcgccactggcagcgcagctcgccgctgcgcgccgacacctggcgcgccagcaggtcagttttattgagcttcgctccccagtaggggatcagcatactgtgggttgaaccggttaccggatcctccagcaccccatcaccgggacagaaaaagcggctaacaaagtcatactcttcgtcggcggcgctgatgcaaatccgcttatccaacgtctccagcagcgccatattcggacgtaccgcttcaacctgcgcccggtcgcgtagcaccaccaggtaatcacgcccttcccgcacctccagcgcgtcatcgatacccaacccggtgaacagtgccggcggtacgtcatgcaccggcgtcgtttgccaggcggggaaatccagcgtcagccaatcgccgctgcgcgtcacccgcagctcaccgacaaaacgggtgctgaatacgatggttgccgaagggtgatcgagatattcaaaaatcacgtgcgatgctgcgagggtggcgtgaccgcagagattaatctcatcaagggtcgtaaaccagcgcagctcatagccgctatcagtgcggacaaaaaacgccgtttcggattgattatgctgctgcgccatttttaaaagcgtttcatcaggcagccattcgctgagcggacacaccgccgccgcgttgccgccaaaattgcgatcgctgaaggcatcgaccaggtaaaaactaatttctttcatcgtgctccccttttttatcgtctatcaacatgacacagaaagcgcgggtgcacactattagctgaaaaattaagttgttagcaggcacaggcgccagcataaaatgagacacagatcacaaagtgattgtattttcgacagcattcgttttaagatcgccttctcttcttttcattactaccagcccggaatttatgcttacaaatacggtctcacgcaaagtcgcgtggctgcgggtcgtcacgctggcaattgccgcctttatctttaataccacggaatttgctccggtcggtttgctgtctgatattgccgacagcttcggcatggaaacggcccaggtcgggatcatgctgaccatttatgcctgggtagtggcactgatgtcgcttccgttcatgctgctgaccagccagatggagcgccgtcgcctgctcattggcctgttcgtgttatttatcgccagccacgtcttgtcgtttttcgcgtggaacttcacggtgctggttgtaagccgcattggtatcgccttcgcgcacgcggtgttctggtcaataacctccgcgctggctatccgtatggcccctcccggcaagcgcgcccaggcgctcagtcttatcgccaccggtaccgcgctggccatggtgttcggcattcctattggccgtatcgtcgggcaatatttcggctggcgtaccaccttcctggccattggtcttggcgctttagcgacgctggtttgcctggcgaaactattgcctgagctgccaagcgaacattccggttcgctaaagagcctgccggtgctgttccgccgaccggcgctgctcgggatttatctgctaacggttatcgtggtgaccgcccactacacggcatacagctatattgagcccttcgttcaaaccgtcgctggcctcagcggcaacttcgccaccctactgctgttggtgcttggcggcgcgggtattatcggcagtattgtcttcggcaagctgggcaatcaacatgcttcagggctgattacgaccgctatcggcctgctgctgatatgtctgctgttgctgctacccgcctcaaggaacgccaaccagcttatgctgctcagtgtgttctgggggatcgcgattatggttatcggccttggcatgcaggtgaaagtgctggcgctggcctcggacgctaccgatgtcgcaatgtcgctgttttcggggattttcaatattggtattggcgctggcgcgctggtcggcagccaggtgagtacgcagttgtcgatgtcggcgataggctacgttggcgcagcgccggcgctggtggcgctggtgtggtcggtgatgatttttcgccggtggcctacgccgttaaatgagcaacaaccacaccactcctgagcattaccgcgggcggtacgtgccgcccgcagcatggaagcttactttttcgctcgtattttaaagatctgttcgaatagcctctgagcttcgttttgtgcctgcaccaactccgttgccgaaagcgtctgcgcgagcatcgatcgctggctgagcgcgccgtactcgccaaatgcgctagccagcgaataccatagatacgccttacgccgatcctcacgaccgtgaatgcctttaagataacactcagccaggcgcttttgagctatcgcgacccctttatatgcagcccgcttaaaataaccacaggcgcgaggcagatccttcgctacgcgtttaccctcgcgatactgcattcccatataattaagggcaaattcctcccccctttcgccgccagttggtaataacgctcggccttgctttcatctggttcaacgccaacgcctctctcccacgcgaaagccagataatactgtgcctcggcattacctttatccgccgctttgctaaaccacttcaacgcttcggcatagttctgcttaacggccacaccattgccgtagatcaaccccagtttaaccatcgctgaggcgtcgcccttttcggcgagagcgagctggttgtgaaaattgacttcgggctcaggctcgctgaccggaatattccgcgccaactggcgctcgcgcgttttgacagaaacttttatgcgattcgaaagatgacgatacagccgccaggcctccttggtttgccgatcatcaagcccggcaatcaaagcgctaacgcgtatcgcgaccagagaacccgattgctctttatcggcggctaacaataaccatgctgccgcataaacgctattttgaggaatgccttgaccatgctcgtacagattactcacgatgaactgcgcgccgccgacatccgccatcgctgctttttgcgcccagtagaacagttgggtgtcgtcagcccttaaccgtccggtacggtcggtacccaagccgttacgataacgcagcgccaggtccatctgtgcgcgcggatcgccgcgctgcgcggcttgggttagccagtaattagattgtatgtaagatttgccgcgggccaggatcgcgctgagcgaatattgtgccgaaacgtcgccttttttcgcttgctgccaaagcgcggggttgacttgttgggcgggaaccgtggtcgtaacgacaagtgcggtgagcataaaaagcacactagagagttgtttcattatcttccttaataaggacgcgcagatccctgtgcgtataacctgcgcagataatgccaaaaaacaacgttaacaaagagaataaacgtgaatgcaagcgcttgtttcagaattcatttaggcgaaaagaaataaaaaaacccgacgtgtacctaccgccgggcctattacggtatttttcgcgatcaggcgtgatagttggtgataatttccagcacaccgttaatgatgaactgcacgcccatacagaccagcaggaatcccatcaggcgggaaatcgcctcgatgccgcctttccccaccagtcgcatgatcgccccagagctacgaaggcagccccacagaatgatccccaccagcgcgaagataatcggcggcgcggccagcactacccattccgggaaattgacgccgtgttttaccgtcgaggcggaactgataatcatcgcgatggtgcccggcccggcggtgctgggcatcgccaacggtacgaaggcgatattcgccgtgggttcatcctgcagttcttccgatttgatcttcgcttccattgaatcatgggctttctgctgcggaaacagcatgcgaaaaccgatgaaagccacgatcaggccgccagcgatacgcagaccgggaatggaaataccaaaggtattcatgaccacctggccggcataccatgccaccatcaggatcgcgaagacatacaccgatgccatcaacgattgccggttacgctcggcgttgttcatattgcccgccaggccgaggaacagcgccacggtggtgagcggattcgccagcggtaaaatcaccgccagaccgagccctattgctttaaagagttccagcatagtgagtcaacatcccgttaagtatcattttttcagtacagtttcaccccgtgagtatatcgacagcagcgacgtagatgccacacccgatgaaaaaatcacgctgataaaaaataacaagcgttagtaaaatggaaaaaagtgaccaccatcaaattatcgtgctttagcaaatcgtggcatcggcgaattcataatgttgacttatgattgccacggcaataatatccatcgcaactaaataattgcctgggcaactatcatggaaaacaccaataatctgttcaacgagatgatccctcttggccgattgatccagatggttaaccagaaaaaagatcgactgctcaacgactacctttcacccatggatatcaccgctacccaatttcgggtgctctgttccattcgctgcgaggtatgtacgacacccgttgagctgaagaccgttttgtcggtcgatccaggcgcaatgacgcgcatgctcgacagactcgtctgcaaaggctggatagaacggttgcccaaccccaatgacaagcgcggcattctggtgcaactgactccagaaggcgcagccctttgtgagcactgtcatcaggttgtgggtcaaaaattgcaccaggaactaacaaaaaatctaacggcagacgaagtggtcatacttgagcaactgctcaagaaagtcctgccgtaataagaagaggtaagatgatgtccagacgcaataacgacgccatcactatccatagtattttgtcgtggatcgaagagaacctggaatctccattgtcgctggagaaagtttcggagcgctcaggttactccaaatggcacctgcaaagaatgttcaagaaagagaccggccactcgctgggccagtacatccgcagtcgcaagttgacggagattgcgcaaaaactcaagcagagcaacgagccaatattgtatctggccgaacgctacggttttgaatcgcaacagacgctgacgcgaacgtttaaaaactacttcgatgttccgccgcacaaatatcgcatcaccaacgttccgggggaatcccgttacctgatgccgctaaataattattgttgttaatcgcctgcataaagacgtattgaggaaaccatgaaatcattcgctaccgccgccatcctgctaatggcgctggcggcaagccagagttacgcggagcaaaccaccaccccggttcgccacaataaccgggatgcgatgattattccttccgaacataacgactcgccgtttgattttaatcacatggctgccggcaatgacaaatcggatgagctgggcgtaccgtattacaactaacccccgcttgttctgatatctccagggccccgcaaacgcggggctttttttatccccgcgccgcgcccgggcgcaccagtcgcaaaccaaacacgttgatatagagcccgcccataatcagcgccgccccaatagctgcaggccattgagccgttcgccaagcaacagggccgcactggccatcccaaccaccggcaccaacagcgacagcggcgctacccgccaggtttcataacgcccaagcaacgctccccagatgccgtaaccaacgatggtggcgacaaacgccagatacataagcgatagcacggtcgtggcgtcgatattaaccaggcttgccaccatcgcctgtggtccatcaaaaataaccgacgccagcatgaacggtaaaaccggaatcaacgcgctccacaccaccagcgacataatcggcggcttgtgttgctgagacataatcttcttgttgaaaatattgccgcaggcccagctaaatgccgccgccagagtcagcataaaaccgaccagcggcacgtgctggccaccgaggctggcttcaaccagtaccagtacgccaaaaatcgccagcgtgataccggcaacctgctttccctgtaaccgctcaccaaagacaaaagcgcccagcacgattgtgaaaaaggcctgcgcctgcagcaccagagaagccagcccggccggcataccgaggttaatcgcgcagaataaaaaggcgaactggccaaaactaatggtcaggccatagcccagcagcaggcgcagcggtattttgggccgcgcaacgaacagcagcgccggaaacgccaccaacaaaaaacgtaaccccgccagcatcagcggcggcatattgtgtaacccgagcttaatcaccacaaaattaagcccccacaccaccactaccagcattgccagcagtccatctctgcgcgtcatacgaagcccctgtcttcctggtcaacgatgaccaccgtcaaagtaaccaaattcccgccgctcgaacagatcattatttttagcaggtgctgaaggcactttccgacacggagcccgctatacaaggctcagttagcatgctatttgtgatcgggcacaacaaaaataaaacacttcatcgggcaaggaaaaaatgacaaccaccatcaggcgctcaacggtagcgctgttggcgtcgtcgttgctgttaaccatcggccgcggcgcaacgcttccttttatgacgatttatctcacccgtcggttccagctggaagtcgatgtcattggctatgcgctctccgtcgcgctggtcgtcggcgttatcttcagcatgggcttcggtattcttgccgataagttcgacaaaaaacgctatatgctgatcgccatcgtgggtttatcgccggctttatcgccatccccgcggtcaatagcgtggcgctggtagtgttctttttctcattgatcaactgcgcctattcggttttctccacggtactgaaagcctggtttgccgacgtgctgacgccggagaaaaaagcgcgcatcttttcgctcaactataccttcctcaatatcggctggaccgtcgggccgcctctcggcacgctgctggtgatgcagagtattaacctgcctttctggctggccgcgctgtgcgccgccttcccgttggtgtttattcagctcttcgtcgagcgcacctctgccgccagtgcggaaggcatcacgccgcagtggacgccgtctgtgcttttgcgcgaccgcgcattgctgtggtttaccttttccggcttgctggcgtcatttgtcggcggctctttcgcctcctgcatttcgcagtatgtgctagccgcaggcaccagcgatttcgcggaaaaagtggtcgcggtagtgctcccggtcaatgccgcggtggtggtcgcgttgcaatatgcagtcgggcgacggctttcggcgcgaaacatccgcccgctgatgaccttcggcaccctgtgctatgtgttgggtctcggcggttttatcctctccggtaataatctggtgatgtgggcatttccgccgccatctttacccttggcgaaattatttatgcgccgggcgaatatatgctgatcgatcagattgccccacccggtatgaaagccagctacttttccgcccagtcattaggctggttaggcgcggctttcaatccgatgctaaccgggataatcctcacccatctgccgcactggtcgctattcttcattttaatgctggcgatagtcgccgcctggctgatgattttccgcgggatgaacgtgcgtccgtggcaaaccgtacaggcgtaaacccaggcgtcatgcggctgtcgggttgctgtcgcctgtctgtcgggtgcctgtcgtggcgcccggcaggctaaaaaaccacactggtctcaggttcccatccggagattaacatcatgaacagcagtacccgagtcaaacaattacgtctgcagcgcgcctggtcccaggaacagcttgccgaactggctggcgtcagcgttcgtactatccaacggatcgaaaacggcgatcgcccggggttagaaaccctgagcgccctggcggcggtgtttgagataaatgtggctgaactcagcgacgatgagcctgtcggtcacgaagcgtcacttgatttacgaattgaagaagcgaaaaaccgactgcatcaggagagccgctttttccgctcgctaagcgtggcggtcacggtttgcgttttgttgttggtgattaaccgtcttacccaaccggatatctactggtcagtgtgggtggcgattgtctggggcgcgttattgctgctgcggggattacgtctgtttgtctttgccgggtggatccgccagtggcgacaggcgcgactacagcgcctgctgcgcaaatagaaaaagcccgcttaatgcgggctatctccttaccagacctgggcggcgatccctgtgaccagccgcactttatcccactgctgggcttcgcttaacgaattgccctcttcggtggaggcaaagccgcactgtgggctcaggcaaatctgctccagcggcacatactgcgccgcctcctgcaggcgcgccttcacgccttccgggttttccagttcgccattcttggtggtaatcagccccagtaccacctgctgatggcctggacggataaagcgcagcggggcaaaatcgccggaacgatcgttatcatattcgaggaagaacgcatcaatgttgacgccgccgaagaggatctccgccacgggctcgtagccgccttctgaaatccaggtcgaacggaagttaccgcgacagacgtgcagaccaacggtcaggtcctgcggcttcccttccagcgctttattcagcacccgggcataggtacgcgccagttcgtccggatcgtcaccgcgctcgcgtacctgctggcgttgttcgtctgaacataaataggcccagacggtatcatcaagttgcaggtaacggcagccagcgtcatagaaagcgcggatcgcgtcacgccaggtggttgctaaatcatcgaagtattcggccaggtcggggtataccgtgctatcgatatcttttcgcccgccgcggaagtgcagcacgctggggctggggatggtcattttcggctgtgcattgccgctgacgcttttcaaaaagcggaaatcttccagcattggatggttgccgaagcccagtttaccggtcacgcgcacgccgtgcgctttagtctgcacaccgttgaactgaatacctttctctgaatcgtaacgttctacgccttccagaccgtcgaagaagtcgaaatgccaccacgcgcgccggaactcaccgtcggtcaccacgtgcaggccgcaatcgcactgctgctgaaccagttggcggatggcttcattctcaatttcacgcagatggccggcatcaatattaccttccgccagctgcaggcgcgcctgcttaatggcgttaggacgtaaaaaactgccgacgatatctgcgcggaacggggcctggtgacgttgcatgttctctccttaacggcaggcaggtagttgcccaccgtgataattcattatttgaatttttagacttctggatgtctatatgtccagatactgtcatgcggagggagcatcggcaaacgagaaaaattcatggctattgaatttatttcatgttggtcgtttcgctgacgctaaatgcgaacccctcatccgcccaaccggtcaggccgccgagcatcatttttaccggtcggccaagctgcgccagctttaaggcggcaatatccgcgccgttgcagtgcggcccggcgcaatagacaacaaacagcgtttccgctggccactgcgccattcgcgcggcattaatctcgcgatgcggcagatgcagcgcgccaggcaggtggcgacgggcaaacacatcgtggctgccaatcacgtgcaacagcacaaagtcctgttcgccgtgctgcatggcgtggtggacatccgcgcagtcggtttcgacactcagtttatgggcaaaccaggcagcggcatcggccggggcggctggcgtaaattggcttacaacactcatggcgtattctccttgtctgtggtaacactactttaaccaccacccgacccggaccaccgcctccattgatgacagaaaacgctgaaatcctgacaatcaacaatgtgacactgtcaccacaaaaagtcgtcgttctggcctatgacggcctgtgtacctttgagttcggcgtggcggtcgagatttttggcctcccgcgcccggaaatgggcgatagctggtatcggttcgcggtcgccgccgtcgatgatggcgagcttcgcgccaccggtggtatccgcatcgtcagcgatggcgggctggcgctgcttgatgaagcggacaccatcgtggtgcccggctggcgtggcatagaaagcgatgttcctcaagcgttgtgccaggcgctggcggctgcgtacgcgcgcggctgcagaatcgtttctatctgttccggggtgtttgtgctcgccgccgccggattgctcaatgggcggcaggccaccacccattggcgttatactgcccggctgcaggagcgttttccgttgattgaggtggtggaagacgtgctgtacgttggcgatgcgcggctgatgacctccgccggcagcgccgcgggcatcgatctctgtctgcatctggtgcgcgaagatttcggccatgaagcggcgaatatcgtcgcccggcggctggtggtgtcgccgcaccgcgacggtgggcaggcgcagcaggtgattcgcccggtggctacagcgcgtgaaagccagcgcctcggccagctgtttgattacctgcatcagcatctcgctgagagccatacccttgcctcgctggcgcaacggatggatatgagcccgcgcactttcttgcgccgttttcaacaggcgaccggcaaatcaccggcccgctggctgctcgatgagcggttgcttcgcgcccgccagcagctcaccgacagccgcctcagcatcgacagaatcgccgaaatctgcggtttcgctaatgccagtacgctacgtcatcactttcgccagcatttcgccgtgagcccgctgcaataccgaaaaaagttttccacccgtcagtgataatattaagatggccagcgacaataattgacgtcgttgatttacacctgcaaggattaagctgatgaaaaaagagtgtcgcgtcgttatctataaagagggactgctgggcagtatgttttttggtgaagcgaaagccgaccccgataaaatgagccggttcctcactgagtacacgcagcagggctgggaagtcaaaaccatggcggtcgaacgccgccgcagcgcactgttctggtcgcgcgaagcgtatttatttgtgcttgaacgcgccatctgatgcgttaatttatttcatataccctaacgccattctggttaatcgtttgtttagattgaccaggatattatctattcaacaaccgtaaaccctgttcaatgaggacaacattagcgcataaataagatggaggtagaccatgctgggaaacatgcatgtttttatggccgtactgggaacaatcctgttctttggttttctggccgcgtatctaagccacaaatgggatgactgatgaacgacgataatccccacccgtaagcgccccctgctgctgttgcaccaggggcgttctgtttttaaagcccgttattgccgttgttgctgccagatagttatttcgtcaaaaagccagccgataaacagcgctgcctcctccttttcctccgccaacggagagaccgccaaccagtagtgccagggataaggcgcagtaattgccgttatctgcaccaactctcctctatccagcgccccctgaaccagagatctacgctccagagcgataccttcgcccagccgtaccgcatcaagaaccagatttgaatcattaacccgtagtccgccaggctcgatctctttctccagcccagcgttcaggcaccagcttttccatgattccatcgaaaaaataatgttgctcgcagccacctcctccggcgtcgctggcagcttgccgccgttataatttggcgcggcgactaccattaattcatccgcaaagagaaaatgacttttaaccccttcccattcaccacgccccatacggatagcaatatcaatcccttcctgttccagagcgctcaccgtcaagctggcctgaagccgcaataagatatgaggatatttctcgcggaatctcattagccgcggcaatagccagtgacacccaaatgaaggtagtgttgacaacgtaagttccaacgtccgaggtttaatctgtaccagctttgtcgcctctgcgatgtgctgcagagcctcgcgaatttgcagcgcgtacagccgcccttcttcattgatttgtacgccacgcccctggcggataaagagttttaccccaacgagctcctcgaggattttgatttgctggctaatcgccgaatgtgtcacattcagttctttcgccgctagcgtcacgctgccaagacgggcgacggcctcgaaactgcgtaaacttgcaatgggtggataattcgacatctgttgttctctgcaccttgccggctaatgtcagaaatacttacgctctgtataagaaaaccatgatattcgtcgctatcggtttacgctaatctgcgatggtctgcttatcggcagcgcctgaacacatgatttcccgataatagaatgatgttaatctggaataaaaaatgacgatgaaacttattggtatgatggattcgccttacgttaggcgtgttgcaatctcgctggaactatatggcatacaatttgtgagcgttcctttatcagtattcagcacctttgatgcgttttcacaaattaacccggttgttaaagcgccaacggcggtactggataacggtttgttattaatggactcgacactgattctacaatatttcgaaatgcaggccgaacccaggcgtaaactgttagcgaaaaatccgcatcggttagcggaggatctgcaactgttggggtttattctcgctgccagcgaaaaggcggtacaaaatgtttatgaacatcgtctccgtccggcggaaaaacagcatcagccatggattgagcgtgtaacacagcaactgctggcagcttgtcatgaatgggatgtaagattggccggccgcactaccgcccaaccgctggatcaggtcatgataaccagtactgtcgtctggtcatttattcaggccatgatcccaacgacaatcccgccccacgattttaaacatatacatggtttagccgaagcatgtgaggctttagccgtttttaaaaaatatcctctggcggaataatcgcgtttataaggttttcctacgcttgcgcgaatacatcacttcatcgctttgttttagcatatccccgagcgtcggataacggctgacatcgctctgtagctcgccgtaagagtaattaatgttatagggttttcctgacgtctggttgtaatgatcgacactctcgcgcagcttttgcaagaatgtgtcggcacgcccgttgcgggtaatgatggcggcgaactcatcgccgcctaaacggccgacaacctcgcctggcagaagatgttgcgtcagaaacgccgcgaaggtttttagcacctcgtcaccttcagcatgcccccacagatcgttaatgggtttgaatttatcgagatcaaaaaagaccaggctaaacggcgttgcgttgctagtaagtgtacggaaacgtttatcgccgatgcggtaaaagccgcgccggttagcgatgccggtcagactgtcggacatcgccatgccaatcacctggaactcatcctcgacgataaacgccagatccttgagtacggcaatctcttcatcgttaaactcgcgcggtgtggtatgaatcaggcatagcgtaccggccacggcgccatccggcaggtggacaggatagcccgcgtagaagcggatatagggttcgcccgtcaccagcgggttatcataaaaacgatcgtcattgaccgcatcattaacgatgaatgggccgtcctgcaagatggcgtgggcgcaaaaggagatatcgcgccgggtctggcgaatccccagcccctgacaggcgagcagccactgccgttcccggtcaagcaggctgatgagtaccaccggcacctgaaaaatttttttagccagccgggtgagtcgttcgaagcgctcatcatcacgggtatccagcaggtcagccagatacagcgatttcagtctttcttcttcattttccggtacgcctgggaatttcataaagcctcattgcactaaagcgaaacaatcaggtggcgggattaatgagcagccgatgaaaagcgcgtcagcgccccataccagtcatagctgccctgggtaccaatttcgcgttcccctcctccagcttgagcagaaaacgacgtttgttgagttgatcgaggttgtggaagtaatttgccagccgtcgggctagatcttcatacatggcaaaagccaccgcggtcccttgcgccgcatcggtatatttcgcaaattctttcttaatcgcctgaaaatcatcgttcattaaaagcaccacgtgctgtcacaatgtcatcagtatggttagccctggccgttttttccatcccgatagctatcagcattttatgctgccttaaaaaatacagccctgggaatctccgagacccacgctatgaaaaacaacgtatttacgctgccatcagcgcaaattatcaacaaccagcagaagataataaaatcgacaagcgacgagaccgggggaatgggcaaaaaaaaaccgccatgtgactggcggtgaataaatgcttgcatggatagatcgtagattgtatttagcgttttcgtagaaaagcgtcgtgagttcctacgtctgactcgcaggctagcacgcccttgttcaataaatcttaaaccgcagacgtactcatagcttctctaccagcgctttgagttcagcgatcagcggcgcggtattgtcctgcgccgcgagcggccacgtcgactggcgtaccaccagccgcgccggcagcagttcgcgcagacgaccggtcggcgccgccatctgctgcatcagtaattccaccgcccggcggcctaacagatcaaaatcctgggcgacggtggtaagcggcggctgaaagtaaaggctatcggccgtatcgtcatagccggtcaccgaaatcgcctggctgccgcgccgattaagctgcgccagcgcgcttagtactccgagcgccatctgatcgttggcgaccacgatcgcgcttaatttcgggtttttatgcagcaactcaaaggttttttgccagccgctggcggcgctccagtcgccgaataccgtaatcgattgactgacccccagccggtgcagcgtctcgcgccagctgccgaggcgcatccgcgccgacaccgagctttccggccctgccaacaggccaaactcgcgatgccctaattcccagaggtggcgcacgcaggcaccgcagccatcacgatgatcgaaacgcacgcaggagacatccgtctcgggagagacatcgagaaacagacaggcgatatccgtattttccgccgccagccgttcggcgacgctgctctccagcggcaggctgataatggcgcctcgaatatgctgggcgcgaaactcatccagccgcgcctgaagcgccggataatcactttgcgccggcatagcgatggcgacctccagcccctgctcaccggcatatcgtttcaccgccgcggcaatttgcgacggcgcatgcagggtcaacgacgcggtgataagccctatcgacgctgccgctttgcccgccaatagctgtgctgaccggttaggcacatagtgaagcgtctgcatcgcgcgcagcaccttttcacgggtgcgctgtgccactatctgtgggttattcaccacccgcgaaactgtctgctgcgaaacgcccgcctcgcgggcaacatcttctaaagtggctgaacggcggtgcatcgcgtactcctgtcagtgaaaacggcttgatgtcttacgctaacattttatgtcttccttacgacagaaatctgctatttgcgccgtgattcgtgatcgtgaatgggtttcattttcgccaacattgcgggtctgtgaaaaatatccgataacccgatgagattgtttagcgaataacatttattaccattatccgtcaggtatgcgtatgcaacgatatgattcaggcgccgctcgcggccccgcttttcacgatgtcctggcccgcgaggactggcagaaccaggctatcacccacctcaaccgcctgcccgcccatcccacttttgccagctggcgcgataccgatgcggcgcgcgacaaccgcccttctgaccgccgccgtcagttggacggtgaatggcagttttcctatgcccgtagtccttttcaggttgatgccagttggctgcagcacgaccaacccgacagtcgcccgacgccggtgccctcaaactggcaaatggagggctatgacgcaccgatatacagcaacctccgctatccgattgataccgtgccaccgcgggtgcctgaagacaaccctaccggctgctattcgctgcagttgaccgtcgatgaggggtggcgggccgaagggcaaacgcaaattatctttgacggcgtcaactccgcctttcatttgtggtgcaacggcgaatgggttggctactcccaggatagccgcctgcccgccgcctttgatttaagcccgtatctgcagcaaggcaccaaccgcttgtgcgtcatggtgatgcgctggagcgcgggtagttggcttgaagatcaggatatgtggcgcatgagcggtatcttccgttcggtctggttgttgcataaaccgcaggcccgcctcagcgatgtgcaattgaccccgcaactcgatgcgcgctatcgcgatgcgcaattacagatcaagcttagcgtcgaggccgcgtctgaagcgctggcggcgctggaagtggaggtcacgctgtgggatgacgacgcgccgattgccagccagcgccagccgctgggtacgccgattattgatgaacgcggcagctacggcgagcgggcaatcatcaatctcgacgtcgaacgcccgcggctgtggagcgccgagcagcctcattgttaccgcgcggtggtatcgctatggcgcggcgatacgctacaggaagcggaagcctgggacattggctttcgccaggtagaaatccgcgacgggctactgctactcaacggcaagccgctactgatccgtggtgtcaaccgccacgaacatcatcatcagcgcggtcaggtggtcaacgaagaggatatggtgcaggacattctgctgatgaagcagaacaatttcaacgccgtgcgctgttcgcactaccccaacgcgccgcgctggtacgagctatgcaaccgctacggcctgtacgtggtggacgaagccaatatcgaaactcacggcatggtgccgatgaatcggctgtctgacgatccgacctggctggccgcttacagcgcgcgcgtcacccgtatggttcagagcaaccgcaaccatccctcgatcattatctggtctctgggtaatgagtccggctgtggcggcaaccatcaggccatgtaccagtggttgaagcacaacgatccttcgcgtccggtacagtatgaaggcggcggcgccgacagcagcgccaccgatattatctgcccgatgtacgcccgcgtagagcgcgaccagccattcccggcggtacccaaatggtcgatcaaaaagtggatcggtatgcctggcgaacaacgcccattaatcctctgcgaatatgcccacgcgatgggcaatagcctgggcaatttcgccgattactggcaggcctttcgcgactatcctcgcctgcagggaggttttatctgggattgggccgaccaggcaatcgagaaaacattcccggatggtagcatcggctgggcctatggcggcgattttggcgataaacctaacgaccggcagttctgcatgaacggcctggtattccccgaccggcgcgcccatccttcacttatcgaagccaaacatgcgcaacagtatttccagttcgccttgctggaacaaaatccgctgcgcatcgctatcaccagcgaatacctgttccgcgccaccgacaacgaaacgctgcgctggcgggtagaatgcgccggagaaacgatagccagcggcgacttagcgctggcgctgcagccgcaagcgcgggcggaattgattcttagcgacagcctggccctgccgcgcggcgcccgcgatgtctggctgctgctcgaggtgatccagccgcaggcaacgtcatggtcacaagtcggtcaccgcgtcgcatggcaatcgttgccgcttgccgcgccgctggcgctatctgaggcgtccgccgaaggcccggcgccggtcctgaccatcaaacccgcgatctacgaggttagcgtgggatcccagcgctggattatcgaccgtcagagcggacgtttaagcgaatggtataccgcgggcgaacaacagctgctgacgccgctggaggatcagtttgttcgtgcgccgctggacaatgatattggcgtcagcgaagtcgaacgtatcgatcctaacgcctgggtcgagcgctggaagagcgccggtctgtattcgttgacgacccgctgcgtgaaatgcgaggcgcagcagctggcacgggaggtgatcgttgatagccactggcactatctgcgcggcgaggagacggtcattgccagccactggcgcatgactttcgcggccgacggcaagctccaggtcaccgttgatggcgaacgtgcagcaacgttaccgccgctggcgcgcgtcgggctgcgcttccaggtcgccgatcaacacgctgaggtcaattggctgggattagggccgcacgaaaactatccggatcgcaaaagtagcgcctgtttttcacgctggcgattgccgctaagcgagatgagcacgccctatatcttccccagcgaaaacggtctgcgctgcgattgcaaagcgctggactggggatgctggcacgttgcaggccaattccacttttcggtgcagccgtatagcacggaacagctgatgacgaccgatcactggcatcgcatgacgccggaaaaaggcgtctggatcacgctcgacggccagcatatgggcgttggcggcgatgattcctggacaccaagcgttctgccacagtggctgctgctcaaggcccaatggcactatcaggttacgcttcattgtcaataataacgggggcttcggccccaccgtacaggtattataagatatgaaactctctgaactcacgccccgcgaacggcataattttatctatttcatgctgttctttttcttttactatttcattatgtcggcttactttcccttttttccggtgtggctggcggaagtaaaccatttaacgaaaactgaaacagggattgttttctcctccatttcgctgttcgcgataattttccaaccggtgtttgggctgatttcggataagctcgggctgcgtaaacatctgctgtggaccattaccgtactactcattttgttcgccccattctttatttttgtcttctcgccgctgctgcaaatgaacattatcgccggcgcgctggtgggggaatttatttaggcgtagtcttttccagcggttccggcgcggtcgaggcctatattgaacgcgtcagccgcgccaaccgttttgaatacggcaaagtacgcgtctccggctgcgtcggctgggcgctgtgcgcgtcaattaccggcatcttattcggtatcgacccgaatattaccttctggatagcctccggttttgcgctggtgcttggcgtattgttatggctgtcgcgcccggaggccagcagcagcgcgcaggttattgacgccatcggcgccaaccgtcaggccttttcactgcgtacggcggcagaactgctgagaatgccgcgcttctggggatttattatttatgttgtgggcgtcgccagcgtgtatgacgttttcgaccagcagttcgcaaacttttttaaaggctttttcgccacgccgcagcgcgggaccgaagtttttggctttgtcaccaccggcggtgaattactgaatgcgatgattatgttctgcgccccagcaattattaatcgcatcggcgcgaaaaacgccctgcttatcgccggtataattatgtcgatgcgcattctcggatcttcatttgcgacttcggcggtggaagtggtcattttaaaaatgctgcacatgtttgaattaccgttcctactggtcgggaccttcaaatatatttcttccgcatttaaccctaagctttccgccaccctatttttaatcggctttaacctgtcgaaacagctttccggcgtagtactttcagcctgggtcgggcggatgtacgacaccgttggttttcaccaggcttacctgatcctcggctcaatcaccctgagctttaccctgatatcgctatttaccttaaaaggcggtaagacgctgctgcccgcggcagagtataacaatgcggcctgagagattaacgttccgtcagggatgacggcaacgccgctttaatttgcgtttgcccaccattattttccagttcgtagatgcggctctgcgcacgcgccgagatcaattgcgccagttccgccgagtggctggtgagccagatctggctatagcgtgatgcttcgacaatcagtcgcgccagcgccgggaacatctgacgatgcaggctgttttccggctcattaatggcgagaaaggccggtggccgtgggctgagcaaggcaaccgccaggcataaaaaacgcagggtaccgtcagacatctccgccgccagcagcggccgataaatcccttcccggcgcatcttcatcacaaaacgcgaattgtcgttctcgcagaaaaaggtacagtcggggaatgcttcgccgaggatttcatgcagcaactcctcagcgccaatttcgacgatagtctgaaatgccgccgccagattgccgccatcgctatcgagcaccggcgaacggtagccaaccgtcggttggcgtagcggtgaaagcctgccgatggcaaactcatggtaaaaacgccaacgccgcatggtctcccgcacgcgcgacacttccggaaaacgatgcggttcgccaagctggccgaaaatggactcgttttcgtaaatggtatcggtgaaggtacttttttcaccgttgacgtcaaccagaaaggccgcctggtttttccgctgcagtacacgcgacgacggccggcggttaaagcccgacagccagatattctcttctttaacgatcggatcgagcatgaattgcgtcggatacggcagtttttccggaaacccgacctgcaattcatattcaaattcatcggtcaggcaggcgatttgcagacgccgtggatggcggtcggtcggcgcctgcttgcctgaccacatgatgttctccagcccgccctcctcgctgacatagctggagaactggccgttagccgaggcggttaacagatggattgctttgtagatattcgattttccgcaaccgttagggccaaacacaatgttcagtggccccaattccagttcaatctctctgactgaacggaaattattgatacgaatacggttaatcatgccattcctcaggcgcgccgatgctcaactgagcgattttttcatcccgcgcgttagcgcgactctggcaagcttatcggcatccagttgtgaatcactaaacacgccgaaaaacaggcgttcattatcaataacctgcgataccacccggtagtttaacggcagcccggacggcgcaccatactgcgcaggagtgacggaaacttccgtcgcggtgtcggcgacgctgacaagcagaccatctgctttgccgcccaccagcatgaccttaattaacgggtgcactgtgttcctcccgagtggggtcaaaaatgtcattgaacaagtccctggccacgcccaagcgccgcaggaaaaaacatcatcgtaagtacttttttatagttcatagcggccaggagtataaaaaaaacaaattgcactttgtaagcacgcattattagtaataaaggccgacaaatgatgaaggaaaaaagtcgaattgtgaatcttaacaactcttatttgttgctccgggcgttgagaatggtcgcaaaatgtacattggttacagtgacatgccgtgcgttttagaaacccggacaaggcgcaatgcgccgccgccgggaaaaaacctggcggcgacgggtagcacagtatctacaaaccgcgatttttcaacatcggctcgatcagcggatcgtgcccgcgccagtcgcgatacagcgcttcgagatcgcagctgttacctcgcgacaagacagcctcgcggaaacgttggccgttttcccgggttaccccccctgctcgacaaaccactgataaccgtcgtcggcaagcatttgcgtccacagataggcatagtagcccgccgcataaccgccaccgaaaatatgtgagaaatagctgctgcgatagcgcggcggaaccgccgcaagatccatctgctcctcgcgcagcgattgctgttcaaaagcatcgacatcctgcggcagcgcctgcggggtgacgctgtgccagtgcatatccagcagcgccgccgccagcagttcgctcatgtcataacccttattgaacgttgaggcgcggaacatgctgtctcgcagatcatcgggcatggcttcgccggtctggtagtgcttcgcgtaatgggcgaagacctgcggctcgcgggcccaatgttcataaatctgcgacgggaattccacgaaatcacgcggcgtattggtgcctgaaaggctcgcatagcgctggttagcgaacaggccgtgcagcgcatggccaaactcgtggaatagcgtgatgacgtcatcccacgatagcagcgcgcaaccgccggcttttggtttctggtagttgcaaacgttgtaaatcaccggacgctgggcacgcagcgtcgattgctcgacaaatacgtccatccaggcgccgccgcttttgctgtcacgcgagaagtaatcgccgtaaaacagcgccatgccttcgccgttggcatcaaagatttcccatacccgcacatcgggatggtaaagcggaatatcaaaacgttctacaaaacgaataccaaacagttgggaggcggtccagaacacgccatcttccagcacccgatccagggcgaaatagggttttagctgcgcttcatcgatggcgaatttagcgcgccgtacctgctcgccgtaatataaccagtcccaggccgcggcctgaaaatcgccgccctcttcatcaataacctgctggatatcggcaagctcctgttcggcgcgacggcgggccgccggcgcgatgcggcgcataaaagccaaagcctcagacggcgttttcgccatctggtcggccatcgaccagctcgcgtaatcggcgacgcccagcaatgcggccttacgcgcgcggatttccgccagccgcaaaaccaattcacgggtgtcgttagcatcccccttctggttacgcgtccagcccgcggcgaacaaattgcgccgggtctggcgatcggcaagtgcctgcagcgccggttgctgggtggtattggtcagcgccagcagccaacggtcgtgcaggcctttgtcgcgcgcggcatcggcggcggcggtaatttcatccgcgctgagtccgtcgagctggtgttgataatcaacaaccagaccgccagacttcaccgccgccagcagacgctgctggaattgactttgcagcgacgcctcctcggtattcaacgcctttagcgcggttttctgctcttgcgccaacgcggctcccgccagctgaaaacgctgccagctcacctcgagcagacgacgcgactccggatccagactcagggcgtcgcgctgctgccaaacctgtttgactcgctggtacagcgcatcgttgagccagatatcgttgccaagctcggcgagctcggcggaaaactgttcgtccagttgctgtatcagcggattggtattcgccccggccatggcgaaaaagacccgggtcacccgccctagcaactgaccgctctgctccagcgcgaccagcgtattgtcaaaatccgccggcgccgggttattgattatcgccgcgatctcctcgcgctggcgccgtacgccctcatcaaaagccgggcgataatggctatctgcaatcaaatcaaaatgcggcgcctggtacggcagtaggctgacgtgtaaaaagggattattgtccgtcattattctctcctgaacacggttatccactaagattaggcaactcgttgattggccgcaatgatttatcctgccagcgcgttataccaacagatgacgatacgattttcctttaccgcgcggcgttatcgcgtgctatgttatgacaacacaaaaagcgttgaggaacagtaagatgattattctggtgactggtgcaactgctggatttggcgaaagtattactcgtcgttttatcgctaatggccacaaagttatcgccaccgggcgtcgtgaagagcgcctgaagacgctcaaagaggagcttggcgataacctgtataccgcgcaactcgacgtgcgtaatcgcgccgccatcgaagagatgatcgccgggttgcctgcacagtggcaggctatcgatgtcctggtgaataacgccggcctggcgttaggtctggaaccggcccatcgcgccagcgttgaagattgggaagacatgatcgataccaataataaaggcctggtctacatgacccgcgcggtgctgccggggatggtcgagcgtaatcgcggccatattattaatatcggttctaccgccggcagttggccctacgctggcggtaacgtctacggcgcgaccaaagcgtttgttcgccagttcagcctgaatctgcgcaccgatttgcacggcactgcgattcgcgtcaccgatgtcgagccgggcctggtaggcggcaccgagttctccaacgtacgatttaaaggcgacgatgcgaaagccggtaaaacgtatgagaacactcaggcgctgacgccggaagatgtcaccgaagcggtgtggtgggtcgcgaatctgccgaaacacgtcaacattaacacgctggaaatgatgccggtcagccagagctttgccggtctcagcgtccatcgtcagggctaacgtcctctgcggcctggcctgtgggccaggtctgggcggaacggtaaaaaacgagtaaaataatgctcataacccattaaaaagtaatcatcaatggccgcagaaacgcaactgaatccgacccagcccgtcaatcagcaaatctatcgcatccttcgccgggatattgtccattgcctgatcccgccgggaaccccgctgtcggagaaagaggtgtcggtgcgatttgatgtctctcgccaaccggtaagagaagcctttatcaaattggcggaaaacgggttgattcagatccgcccacagcgcggcagctatgtgaataaaatctcaatgacccaggtgcgcaacggctgtttcgtacgtcaggccattgagtgcgcggtagtgcgccgcgcgggatcgatgatcaacgatgaacagctctatcaactggagcaaaacctcaaccagcagcgggtggcggtagagcgtcagcagctcaatgattttttccagctcgatgacgaatttcaccagaaattatcccttattgccgactgccagctggcgtgggacaccattgaaaatatcaaagcaaccatcgaccgggtgcgctatatgagtctcgatcacgtgactccgccggatatgctgctgcgtcagcatctcgatatttttcaggcgctggaaaaacgcgatcttgatgccgtagaaaaggcgatgaatatccacctgcatgagattagcgagtcggtattgttgattcgtcaggaaaatagcgagtggttcagcgaagaataatgggattaacggcagccaacgttgcgtcagctgccgtaaaatagattaccgcaccactaacacaggaactttggcatagcgtaaaacggattcggcgtttgaaccaagaagatgggttgaaatacccggtttgcgagagccaataacgataacgtcaaaattctctttttcgctcatcgctaatatttcatcgcgcacattgccaaaaacaatgcgggtatggatccgcgacgccgggattgaaaacaatcgcgacagatcgcgcattttcttttccgactcttctttcatgaaggcttcaaatttacgaatatccgccgtgaagccgcgcagcaaagaactggtgctgtttggcagcacgttcaacaacgtgatttcaccctcttcggcagatgctaaaaaatcggcgtgacgaacggccttatcgcttaaatccatttcaaaaacatcgaccggcaatagtatttttttgtacatagcctgagctccttagtcctgaagaaaccgttggggtgattttattctgccatatttaaacgtatgggaatacgatcaatcacccaaataaatacttcagtgataaaaataaacttcagcaatatataattaattatagatatttagagttatgtacaggcggggaatatcacaaggtattcgtattgctaatacaaaaataacccgactcgctacgcgatgccgggctatgaatgaaatgatggttttttactgggctttagcccattcggcaacggtcgccttcgcaccgtgaatctgtaaagagagatacgccgccgtcaccgcatcgacaaaacgcggttcctgcggcaggctatcgccgaaaatggccttaatacccagcagcgcccgcacgcgctcgctaccctctttactgccctgcaccgcctgttgaattaccggcagcagcggatcgctgatttcaattgcctgcccttgatcatcgacgccgctcacgtagcgcatccagccggcaatacccagcgccagcaggctgaaatcactgtgatgcgccaggtgccagcgcacggaatcaagcatacgctgcgggagcttctgactaccgtccatcgcaatctgccaggtgcgatgcttaagcgccggattgctataccgctcaataagcaaaccagcataacgcgccagatcgacgccctgtactttcagcgtcggcgcttgctcttgcaacattaacgcctgcgcggcacggcggtagttatcatcctgcatgcaatcattgatatgctgataaccggcgagatatcccagataagcgaggaaagaatggctgccgttgagcatacgcagcttcatctcctcaaacggcactacgtcactgaccagctccgcaccggctttctcccactgcggacgaccggcgacgaagttatcttcgataacccactggcggaacggttcacaggccacaccggccggatcgcgcaccccggtgagttgttcaattttatccagcgtatcagcggtcacggcaggaacaatacggtcgaccattgtggaagggaacgtcacgttctgctcaatccactgtgccagttcgtcatcaacggcgcgggcaaacgcacaaactacgttgcgcattacgtggccgttttccggcatattatcgcaggacatcacgctgaaagccggcagaccggcggcgcgacggcgcgccagcgcttctaccaccacgcccggcgcggattttggctggtgtggagtttgcagatcggcggcaatcagcgggttatcgagctgcagctgaccggtggccggagagtggcagtagcctttttcggtgatggtcagcgagacaatcgccacctgcggctcgcacattttcgccaacacgctttccaggccatcgacctgcgcatgcattgcctgcttcaccacgccgacgacgcgcgcggtccaggcatcggcggacatttcagccaccgtatagagcaagtcctgctgttgcaaatcggcaatctgctgctcaccgccaatgaggttcacttcggtatagccccagtggctgccgtgttcggcggcaaggatatcggcatacactgcctgatgggcgcggtggaaagccccaaaaccgagatgaacgatgcgagaaaccagcttgctgcgatcgtaagaaggaagcgttgccctggcgtttaaaagcgtgttttccatggtgtctctcatttttatgatgactgataaatcattctcaaacagaatgttttggtgaggtaaaccatcgcacgcaattggtatgacatctttgatttccatcaactaccatacaagaagatccggcgctgtcgcgtttcgtgatcctgcgcgcaatggcgggaatgagccgggaataaacccggctggatagcgtcaacgatgagattaggatttcgcgtattggccgttcgcgctcagcgcctggcgtgtacctgcgtccgccgcatcgtggtccagactcaggtcacggtcgcacacttccggcatcagcaaggacgagatgagaccgatagctgaatagcagatcagcatcgcgacaatcggccaccacgaaccggttacgttacagaagataccggccagcaccggtccgaatcccaccgccaccagaccgccggcctcttttgagatagccattctggtgaagcgattacgcgagccgaacatttccgccatagtaatattttccagcgcgaacaagcccagcaccgccacgttatgaatgacaatcagcgatagcataattgtgctggcgctatagcttttatcgacaataatggccagcatcggccaggccagaataatggccgaaatattcacgataatataaggcaaacgccgcccaactttatccgacaaccaacctaacagcggaatagtaataaaaccaatcactgagctaatcattaaggcatcggtcggaatcgctttatcgaataatagggtttgaaccagatatcccgcgagaaatgtttgtaataaaccggaattaccggcctggccaaaacgtaaaccggtcgccagccagaatgatttgctttttaacattgcgccgaacgtgttttgcgcagcggcggctttagccttaatttcatcggcttcgttgacctgttcaaataccgggctctctttcagattcaaacgcagccagatggcaaagatcattaccacgacgctcgcgaggaacggaatacgccagccccaggcgatgagttgttcgcgatcgagcaggaagaacattatcgcccagatggccgtggcgctcagcgtcccgcagttggtgcccatcgccaccagagaagagatgatgccgcgtttccctttcggcgcatactccgccagcatggtaccagcgccggaaatttcggcgcccgctcctagcccctggataatacgcagggtcaccagtaacactggcgcaaaaataccgatctgcgcgtaagtgggtaaaacgccgatcaacgtggtacaaattcccatcatggtgatggtaataaacagaacctttttacgcccgatgcggtcccccattttaccgaatatgaaagcgccgacgatccgcgcaatatatcctgcgccataggtccccatcgctaatatcagcgccatggctgccgactgctccgggaaaaatatctcatgaaagaccagcgcggcgcccaaggaataaagctggaaatccataaattccaatgcggtgccaagccagccggataccgcggcacgaattagatccgaggtgcttctctcttttttagctgtcgtcataataataatctctaaagtaggatacagcgaggttatttatatttatgcgttgaaggttaataacaccttacaacaatgcttgcgatcttcttcaaataacgtcatggcatcgacaacatcctcaaaggcaaactgatgcgtgattagccgatccggatttattaatccgtttgccaaccattcgagaaccagcgggaatttattggcattgagcctggacgaataaatagtgagctctttgccggtgatcccctgctgcgccaccattgaaggttcggtagaaaagcccatcagcacgatcctgcccgccggcgaggccagtgcgatggcctctgggaaaatcgccggatggcaggcggcgtcgataatcagcgtcgggcggatcccctgcgcttccagcgcctgcgccagcggctgttccttattattgatggtccagtcggcgccgttttgctgcgccatctgcagccgctcggggatctggtcggcgacgatgacctgccgcacgttatagacacgcttgagaacctgaatggtggtcagccccattggcccagcgccgtaaaccagcgcgatgtcctgttcgcgtggtttggcctggccggtgacattcgccgcaatggtaaagggctccaccattaccgcgtgatggtcactcacgttctccggcaccggccaggcatttttggccggtaccaccgcgtattcgctaaaaccgccatcgcgatggacgcccagcaccaccagcgaagcgcagacgttgggcttaccgaccgaacagggataacagtggccgcagctgataaccggatcaaccgtcacccgctggcccacgactttatccgtcaccccctcgcccacggcatcaatcacgccgaaaaactcgtgcccaataacccgcggatatttggcaaacgggttatgtccacgatagatatggctatcggagccgcaaattcccgccaatttcacctttacccgcacttccccgttccccggctgcggcagcggccgttcttcaatcgccagcgcgttcggctgttggataacaatacttttcatttttctctccttaccaattccacagcgtgccatcttcgaggcgcgccaccggcaaacaggcgggttcataggggtatttcgccgccagcttctcgtcgaactcgatgcccaaccccggtttttcgcccggatgcatatagccattgtcaaaacgccagctatgcgggaagacctccagcatctgttcggaatagcccatatactcctgtacaccgaaatttggcacccacaggtcgaaatgcagcgccgccgccatgcataccggagagagatcggacggcccgtgagaaccagtgcgtacctggtacaacgaagcaaaatcggcgatgcgccgcatgccgctgatcccgcctgcgtgggtaatggtggtgcggatataatcaatgagctgctcttcaatcagctgtttgcagtcccagatgctattgaagacttcgccgacggcaatcggcgtgacggtatgctgacgaattaagcggaagcacgcctgattctctgccggtgtcggatcttccatccaaaacaggcgatactcctcaatacttttaccaaagcgcgccgcctcgatcggcgtcaggcgatggtgcatgtcgtgtagcaggtgctcgttaaagccaaatctttcgcgcacggcggcaaacagccgcggggtaaaatcgagatatttttccgttgaccacagctgctcttcaggccacacgcctttggtcgccggctcgtatgcctgacctttgcccttggccatgccgtaggtggttttcatccccggaataccgcactgcacgcggatcgccttaaaacccatttcctgatggcgggcgtagtcgtccaacacttcatcaatggaatgaccggtggtgtggcaatagaccatcaccccttcgcgcgaggcgccgcccagcagttggtaaagcggcattccggcggctttggctttgatatcccacagcgccatatcaacggcggaaatagccgacatggtcaccgggccgcggcgccagtaagcgcctttgtagaagaactgccagatatcttcgatgcggtgagcatcacggccaatcaactgcggacaaaggtgatctttcaggtacgaggcgaccgacaattcacggccgtttagcgtggcatcaccgaggccgacaatcccttcatcggtggtgatttttaaggtgacgaagttacgccctggacaggtaacgaacacgtcggcggcaacgatcttcatgggtaattccttacatctgtgcggttagtgatcaaaattaaatcaccagacctactaccatacaagtatgatatttaaaaaagatgcgaaggatcacaaatgggtttggttgcgggggacgtctggcgcccccgcgttagcgattaattgatgcggtcttttacgatgaagaaatagcacaacgcgccggtaaaggtcacgcaggcggcgataaccaaggccaggttgaaggagtgcgtggtatccaccacccaaccggtgacgaccggtgcaaaagaggcgaaaacaaagctgccgaagttctgaatcgccgccaccgacgcaactttattctcgctgaccatcacctgtaccagccccaggccgaggtcccggcaaagtggacgcagaatagcgccatggagataaaagccaccgcctgggtcggcgagctcgattgcaccaccagcagcgtgccgagcgcggaaagcaccagtccgactacaatcgccgttttgcgcgttttcgccagatcgtagccgcggcgcgccagcgcatcgaccaccagcccgttgacccacatacccaccgccgcggccaggaacgggatcgccgccacccagccggttttcgcaaggctcaatccctgctgcgcctgcagataacccggcagccacgcgatatacagccagccggtatagttaaccccggagaagcctaaaatcatgccccaggtggtgcgccgtttgaacaacgccagccactcgctgaataccagcgttgggcgcgctttttccggcgccgccagatactggcgctcctcctgctgcagatcgaactgtgcgcggttgcgataccacgcgtaccaacacaggcctacaacgatccccgcaaggccgataaccacgaacatggtgcgccagccccaggctatctgcatcagcaccagcgctggcggcgcaatcgcctggccaagcaccgttgacgagttaaaaatgccgaccgcggtgccgcgctctttttgtacgtaccagtcggtaatggattttacccccgccggcataaacggcgcttcgccaatcccgaggccaatgcgcagcaaaataaagtggctaaaggagttcacgaccccggttagcgcctgcatcagcgaccagaaaatcagccccgcccccaatacaatccgcgggccgaagcggtcgagcaaaatccccgatggcagctgcgcgaaaccatatgataacgagaaagcggaaagcaatacgccgaattccgtcgcgctgagcccgagatcgccgcggatggcttctccggcaacgcttaatgacgaacgatcgagaaagttgacgataccggcgataaacagcagcgtcagggtgactttttgcacccggccaatgcgcacgggtttggcgccagcttcgctggcaagggtttgtgtagccataattgcctcttacgataaacagcacgatgcggttagggtaagtaaggcaactagtcggctaccatacaagaatcaaggttaaaattagcgtggaagatcacaaagggcatttttttatgctgctgcgcgacgttatgcccgcccccagcctgcaacgatgatcagcatgccgcacagcgcaatcgccgcccccgcccaatcatagtggctcagcttcacgccgtcgacgaaacgcagccacagcagcgcggtacagacgtagacgccgccataggcggcatacaccctgccgctggcctccgggtgcagggtcagcagccagacgaacatcgccagcgccatcgccgttgggatcaacagcagtggcgaaccttcccgcttcagccatagccacggcaggtaacaaccgatgatttcgcacagcgcggtagcgaagaaaagtaatgtggttttcagcattaaagtttggtaaatgagacaatttgttgcactagtgtacgcgataataggctcatacccatgccattttgtccggtaggcgcgggtagcgagttgtagtaaacttgtccaactggttaaccctttttatcactcaaaggaaatcgtgatgaaaatgacacgcaataaacgctggtgcctgaccgccctgctggcggcaagcgcaatggtctataccgcttcgtccttcgcgcaaaccgacaaactggtgatcgagtccggcgacagcgcgcagagccgtcagcaagccgcaatggaaaaagagcagtggaacgatacccgctcgctacggcagaaggtgaataaacgcgcggagaaagagtgggacaaaaccgacgtcgccttcgatgcgcaggataactgccagaagagcgccaacgtcaacgcctactgggaacctaacactctgcgctgtcttgaccgccgtaccggtcgcgttgttacgccataattccccggcgcccgtgggcgccatcctctatttctattcatgcacacaggattccccatgtctgacgccctcacgtcaaactccgcccgcttgagcgcgaagacctgcgcttcgtccaccagcttgataataacgccagcgtaatgcgttactggtttgaagaaccttacgaggccttcgtcgaactctctgacctttatgacaaacacattcacgatcaaagtgaacgccgtttcgtcatcgaatgcgatggcgaaaaagccgggctggttgaactggtggagataaaccacgttcaccgtcgcgccgagtttcagattattatctccccggaatatcagggcaaagggctggcgacgcgcgccgctaagctggcaatggactatggctttaccgttctgaatctgtataagctgtatctgattgtcgataaagaaaatgaaaaagcgatccacatctaccgcaaactcggttttatggtcgaaggcgagctgattcacgagttctttatcaacggcgagtaccgcaataccattcgcatgtgcctgttccagcatcagtaccttgagaaacatcgtcctcaaggccagacgctactcaagcccacggctcagtaatagtcgatactgtttttgatgctgtaatgtcgcgtcaccgccggctggacgctttcatcgacaacctgcatctcgcagcggatcgggttgtcgtgatcgtcatagtcgcaggtttgattgaccttgcctaacgcgcggtcgttaaatacgctcaccgcgctgtaatcgagctttttacgcggatcggtggacggcgtcgatacgacactgaagcgctcatctttggcggtggtggttttgcccagcggatagccttcgctgtcgtaacgatagctggaggtactctctttcccccgtgccgtcaccacaaacccgttgtcatcagtctcccagctgacgcccgctgccggcatctcggcgagctggcatttcccctgcagccgcaggcgtttctcctgcgtttgcgcgtccagatagtaattcgcgtcaagtactagcgttgcgccggttttgttttcgaggtcggtaaaatccagcagatcaaaacagccttctgccgacacctgagcacgcacccgcttcaccatttccccctggtcatcaaacagaatttgggtaaaggttttaaccgggccgcgcagcggatcgaactcaaactcattggaaaaactggccatctccggggtaaacgccgccggcgttgacggcttatcgcaggcgctgagcagcaacgccgccgggatcagcaaaaacagtttattcacagccgctacctttttgggaatattccaatcattttagcaaatacaattatttacaccaattctgctatgcttaaaactggatgacatcaataaggagcttatgatgaaactatccccatggttatgcgcggtcctgctactgggttcggcatccgtactggcagcgccggattcctgcgagcgggtaaaaggcgagatccagcaaaagatcatcaacaacggcgttccggcttctggttttagcctggccattgtaccgaacgatcagcctgaccaacccggcgctcaggtggtgggccactgcgctaacgacaccttcaagataatctatacccgtaacggagacgcggcggcgaccgattccgacgggcaataacccccgctttcgagtgaaggatcttatctctggttgaccggagataagtttcccctacccctaattaagtattattcctcacccatgcgccagcaaccacgctgttgccagcggcatttcgcataataaaaatcatggagtgagcacaatgtcctacccagaacatcccggcggcgtcagccgtcgcaacctcataaaatcctcagcaatcggttcactggccctggctgcaggcggtctgtcgctcccgttcagtctacgtgccgcggccgccgccgtgcagcaagccaccggagcagaagaaaaaatcgtatgggggcctgctcggttaactgcggcagtcgctgcgcgctgcgcctgcacgtccgcgacgacgaagtggtgtgggtggaaaccgataataccggccacgatatctacggcgatcatcaggttcgcgcctgtctgcgcgggcgttctattcgccggcgtatcaaccaccccgatcgtctaaactacccaatgaaacgtgtcggcaaacgcggcgaaggaaagttcgagcgcattagctgggcggaagcgctggataccatcgccgcgagtctggaacgcgtggtaaaagagtacggcaacgaagcggtctatattaactactcttccgggattgtcggcggcaatatgacccgctcttccccttccgcctcgccggtaatgcggctgatgaattgctacggcggctcgcttaaccagtatggtacctacagtacggcgcagatcgcctgcgccatgccctatacctacggcagtaacgacggcaacagcacctcggatattgaaaacagtaaactggtggtgatgttcggcaataacccggcggaaacccgcatgagcggcggcggcattacctggtacctggagcaggcgcgtgagcgctctaacgcccgcatgatcgtcatcgacccacgctataccgataccgcggccgggcgtgaagatgagtggatcccgattcgccccggtaccgatgccgcgctggtcgccggtattgcctgggtattgattaacgaaaacctggtagaccagccgttcctcgataaatactgcgtcggctacgatgagaaaaccttaccggccgatgccccggccaacggccactataaagcctatattctcggccaggggaggacgctaccgccaagacgccgcagtgggcctcgcgcattaccggtattcccgccgatcgcatcattaagctggcacgcgaaattggtatgacgaaacccgcctatatctgccagggctggggcccgcagcgccaggcgaacggtgagctctccgcgcgcgctatcgccatgctgccgattttaaccggcaacgtcggcatcaacggcggcaacagcggcgcccgcgaatcaacttataccatcaccattgagcgcctgccggtgctggagaatccggtaaaaaccgctatctcctgctttagctggaccgacgcaatcgctcgcgggccggaaatgaccgcaacccgcgacggcgtgcgcggtaaagagaagctgacggtccctattaaatttctgtggaactatgctggcaacaccatcattaaccagcattccgacatcaataaaacccacgatatcctgcaggacgagagcaaatgctcgacgatcgtggttatcgaaaactttatgacctcgtcggcaaaatacgctgatattctgctgccggacctgatgaccgtagaacaggaagatatcatccctaacgactatgccggcaatatgggctatctgattttcatccagcccgccaccacggcgaagttcgaacgcaaacctatctactggatcttaagtgaagtggcaaaacgccttggcgacgatgtgcatcagcgcttcaccgaaggacgaactcaggagcagtggttacagtatctgtacgccaaaatggtcgccaaagacccggcgctgccgggctatgacgagctcaaaaaaatgggcatctacaagcgtaaagatccaaacggccatttcgtcgcctatcgcgattttcgtcgcgaccctgaagcgcatccgctaaaaaccccttccggcaaaattgagatttactccagccgcctcgccgatattgccgcccgctggcaactggaaaaaggcgaagtcattagcccgctgccggtctatgcctccacctttgaaggctgggacgatccgttgcgcagccaattcccgctgcaaatgtttggcttccattataaggcgcgtacccactccagctacggcaacgtcgatgtcttacaagcggcctgccgtcaggaagtatggcttaaccccttcgatgccgaaaaacgcgggattaaaaacggcgacatggtgcgcgtctttaatcagcgcggcgaactgcgtattccggcaaaggttacgccgcgtattatgcctggggtaacggcgatgggtcagggagcgtggcacaacgccaatatggctggcgatcgcgtcgaccacggcgcctgcatgaacaccctcaccacccaccggccttcaccgctggcgaagggaaacccgcagcataccaacctggtcgaaatcgagaaggtttaaggagtaaaccatgagcactcaatacggattttttatcgattccgcccgttgcaccggttgcaaaacctgcgagctggcctgtaaagactacaagaacctgacgccggacgtcagcttccgtcgtatctacgagtatgccggcggcgactggcaggaggacaacggcgtctggaatcagaacgtttttgcctactacctttccatcgcctgtaaccactgtgaagacccggcgtgcaccaaggtctgtccgagcggggcgatgcacaagcgcgaagacggttttgtggtggtcaatgaagaggtgtgcatcggctgtcgctactgccatatggcctgcccgtatggcgcgccgcagtacaacgccgctaaagggcatatgaccaaatgcgatggctgtcacgagcgtgtggcacaaggcaagaaaccgatttgcgtcgagtcctgcccgctgcgggcgctggacttcgggccgattaccgaactgcgtgaaaagcacggccaactggccgccgtggcgccgttgccgtcagcgcacttcaccaggccgagcattgtgataaaaccaaacgccaacagccgtccgtgcggcgataccaccggctatctggccaatccgaaggaggtctgaaatgggaaatggatggcatgaatggccgctggttctgtttacggtactggggcaatgcgtagctggcgcgattattgtcagcggcctgggctgggtgtcgctctgtggtcagcgcgaagcgcgagatcggctggtgcgcagtatgttctttatctggctattgatgggaattggttttctcgcttctgtcatgcatctcggctcgccgctacgggcatttaattcactgaaccgcgttggcgcttcagcgctcagtaatgaaatcgccagcggcgccctcttcttcatcgtcggcggattctggtggctattggcggcggtgggaaaaatgcccgctgcacttggcaaaatctggttgtttctcaccatgttgctggggctgctatttgtgatggcgatgacctgggtctaccaaattgacaccgtgccaacgtggtacaatggctacaccaccagcgcgttcttcctgacggtactgctcgccgggccgctgttcgctgccctgctgctgaatctggcgaaagtcgatttcaacggctggttttttgccgcaattagcgttgccgcactcatcatcagcgtggccgttgttgtcttgcaaaacgcggatctcggcacgatccacagttcagtacaacaggcgaacgccctgctaccggattacggcagactgcaggttctgcggctaatcctgctggcgctcggtctcggctgctggctgtgtccgctgatccgccgccagccgccgcgcgccgccgggttattgatcgggctgatattggttttagtcgcggagtgtataggccgcggcctgttttatggcctgcatatgaccgtgggtatggcggttgcgggttaacgagacggcgcgcctccgcgcgccgcagtaaggaatagggtaatgatgcagatcccaaatcgcgacgccgtcgcactaagcgcccgcacgctgggcgcgctgttctcatatacgccgaatagcgagcaaaacgcgccgctggtcgccgcttttctggatggtagctggcagccgcagtggccgttcccggtctccgattcactggcaatggaatttaccgccagcagcgacgaggcgctgccgcaagcctggcagcgtctgtttatcggtccatgggcgcttcccgctccgccgtggggttcggtgtggctggataaagagtcggtgttattcggcgactcaacgcttgcgctgcgcgagtggatgcgcgccaacggtatcgctctggatcttgaacgcaacgaaccagaagaccacttcggcaccttgctgctgctggccgcatggctgtgcgaaacaaatcaggatgagttatttgcgcaactgttggcctggcatctactgccgtggtccgggcgtttcctgagcgtatttatggaaaacgccgggcatccgttctatcgggcgctgggccaactggcgcagtcgacgctggctagctggcaggaatatttgcccatcgcggtggcggaaaagcagctgtatcgttaactcaccggccgcgtcgatccccggcgcggcacttatagcttttgcatctaaggttattccctatcacaataacgctatgaatcccaatttcactcccgctaatgcatcgtctccataactatcctgatgtgcaggtgatgtttcgtcgcctgatcatcgccacgctcgtcggcatctttgcggcgctggccgtggcgctgtttcgccactcgatggtggcgctggagactttatttctcggtaatgatagcggcagtctggtgaacgccgcgcagtcgctgccgtggtggcgtcggctgctgacgccggcacttggcggaatcgcggcggggacattgctgtggttatggcaacggcgtagcgtctcgcgtccgcacgcggcgaccgattacatggaagcgctggaaaccggcgatggctgtttcgatacgccggcaagcctcgtcaaatcactggcatcactgctggtggtcgtgaccggcagcgccattggccgcgaaggggccatgatcctgctggccgcgctggccgcctcgctgtttgcccgccgctataccccgcgcgctgaatggaagctgtgggtcgcctgcggcgccgccgccgggatggccagcgcctatcatgcgccgctggcgggtagcctgtttatcgccgaaatcctcttcggcaccctgatgctggcctcgctcgggccggtggtcatttcggcggtgatcgccctgttgctgaccaatttactcaatggcggcgccgcgccgctgtaccacgtcgtctttcagcaaaacctgacagcgctgcattacggtttaatgctggcgaccggtctgctggccgggctgtgcgggccgctatttatctggctgatggactacagccaccgtggtttcgtccggctgaaactgtcgccgccatggcagttggcgctgggtggactcatcgtcggcatgttatcgcttattaccccggccgtgtggggcaatggttatagcgtggtacaaagctatctgctatcgccgccgctatttagcgtcattatcatcgtctttgtctgtaagctgttggcggtgctggccagcagcggctccggtgcgccgggcggcgtctttaccccgacgctattcgtcgggctggcaataggaatgctgttcgccacttttagcggtctgtggctgcacggcgatcgggatatggcgattatgattggtttaaccggtatggcggcgtttctcgccgcgacaacgcatgcgccgattatgtcgacgctgatgatttgtgagatgaccgggcagtatgtgctgctgcccggtttattgatcgcctgcgtactggcctcggtactgtcgcgaacgttacgccgggattcgatctatcgccatcacgttgccgagcacgtctaagtcaacatactggctgagttcgcgctgttcggcgcgcggcagataaggcagctcgccaatcagcggcgcgggcagctttttgctcagcacgtcgatgatttcagcgtagtgcgccaggcctgggttaatgcggttggcgacccagccgatcaatggcagaccgtcgttggcgatcgcctgggcggtcaacagggcgtggttgatacacccttcctgaatgcccaccaccagcactaccggcagttgttcctgcaccacccactcggagagcggacgtaagtcgttcatcaggctgcgccagccgccggtaccttccactacgacatgatccaccttgccgctgagctgctgcaggccgtcgctgagtaagccgtagttgatcgggcagctgtgcgccacgctgctttcttcttcacttaacgcgatgggattgacagcatcatacggcagcgacagcgtcgacacgctctgtaataccagcgcgtctttgttacgcagtccttccggcgtctctttgctgcccttcgccacaggcttatacccggcgacgcttttaccgctggcagcaagtgcctgcagcagcgcgcgggatactaccgtcttcccgacagcagtgtcagtacctgttataaagaaacgcttaaacatcactaaccccaaagttgtgtatacgaaaaatacataagagaaataatcaacagtgggaaaagtctacgcgaagccgttgggactcagattgagatagcgcaatttttggtgcgactatgaaaaaatgttaaccctgtaacagtcggataaggagcgatccgttatagagggcatctttcaccaaagccgcgccagccatcgttccgcggtttgagaactgggtgctctcaaccgcgatatgacgactataggccggtagcgcctgttgccgaatacagtcagaaattgccggaaacaaaatatcggatgcctggttgaacggcgaaccaataaggattttctgcgggttaaacagattgaccatgatagccagaatacgccctacatgggcgccaacgccggtaatgatatcccgcgccagtaaatcgccctgctgcgccgcctggcataaccattcaacgctcaactgctgttgatgcagcatagagctcatggattttgccatgcgcatctgcgccagttccagcacgctttcgacgctggcgatggtttccaggcagccgtgattgccgcaatagcagcgtttaccataagggtcaacctgggtatggccgatctccaccaggctgctgctcccggcgtgcaacaggcggccatcggtgatcactcctgcgccgacgttgtggtcgatcaccacctggatgacgtcgcgcgccccccgtgatgcgccaaacaacgattcggccatggtccaggcactgatatcgtgctgtatatagaccgacaccccggtgtgattagccagagcctcaccgagcggcatgtctttcacgtcatcataaaacggcattcggtgaatgatgccgttttcagtatcaatgatccccggcaaggtgatggcgatagcggtaagtcgttcgagcttgtgctgatggcgaataaaaaactggtcgatgtgctcgatgatccgcgtcagcagcggttgcgcatgctgcaacggcagttccagttgttcttccaccaccagtttgctgctcagatcgcgcaacgccaggtggatttcccccgactgatgcgcaacgacaaataatgccatgcttccgtttcaaccatcagcccgaccgccgggcggccgcggctgcccggctcctggatttcagtctcctgcaccagatgcgcttccagcatctcgcgtacaattttggtaatgctggccggcgccagttgcgcaaatcgggaaaggtcgatacgcgacaccgggccaagctgatcaatcaggcggtataccgcgccggcattggtctgctttatttgatcgatatggcctggttgactgtccgctaccaccgttgactccctttattttcgcgcttcgaaataaactttcggctatggtgaagcacttcgacggtacacgtcaaatttttacttagccttgtgatttgccgcacatttttaccctgtttttgacttaattcgccagggcggcggcagcgagaagataatcgcgaaagcgctgcgccgccagcccttgttcgcggtgtttggcccacaccagccacatttccgacaccgcatcgggttcactaatcggcagccagcgcatttcattcaactgcacccgcttaaacgaggccggtaggatcgataccccaagacctgaagccacaaggccaatgatggtcattgcctcgccgacctcctgggtgatgaccggcgcggtaccgtagcggcgcatcagcccgagaatatcgtcatacaggccggtaccaacatgcggatcgaaaaagacaaacggctcgcgcgccagctcaaggaggctgatcgcctgctgacgggccagaggatgatcgctgggcaccatcgccagtagcggttcgcgcagcactttttcccagcacagagtgtccggcagctgcgtgttgcgcatcagcccaaggtcgagcgccccttcatttaacggcacgatctgttcgcgggtgttggtttcgcgggtctggatatggacatcgggaaagcggcgacgaaaagtggaaagcgtatcggaaaccgctttgataaacggcgccgacgaggtgaagccgatacgcagttcaccggtttcgccgtggtgcaggcgcccggcgcgagcggcggcatcttcaacctgcgtcaatatttggcggctatcggcgaggaactgcactcccgccgccgtcagactgacgctacgattagtgcgggcaaacagccgcgcgccaatctggtgttcgagaatctgaatttgctggcttaacggcggctgagagatgttgaggcgcgccgccgcacgaccaaaatgtagctcttctgccacggcgacaaagtaacgcagatgacgcagctcaatattcatatttaaaacgtcttatttgagattattaatatattagacggaatatttacaattttataccctaaaaatgtgagctgaatggtcacatccgtttgtttgtaatcccgctgtatataagcaaggaattctccgtgagcaacacaacaaccgccggtcccgcgccggcgagcagcgccagtgataaggccgttacccagccaaatcaatttattaaacgcggcaccccggcgtttatccgcgtcaccctggcgctattttccgccggactggccaccttcgccctgctctattgcgtacagcccattctgccggtgctgtcgggcgagttcggcgtaagccccgccagcagcagtatttcgttatcgatttccaccgcgatgctcgccgtcggcctgctatttaccggtccgctgtcggatgccattggccgtaaaccggtaatggtcaccgccttactgttggcggcgtgttgctcattattatccacgatgatgaccagctggcacggtattctgatcatgcgcgcgctgattggcctgtcgctaagcggcgtggccgccgtagggatgacttatctcagcgaggagatccacccaagcgtggtggctttttcaatggggctttatatcagcggtaactcgataggcggcatgagcggccgactgctcaccggggtctttaccgatttcttcggctggcgcgtggcgctggcggtgataagcgccttcgccctcgcggcggccattatgttctggcgtattcttccggagtcgcgccacttccgccctatctcgttgaaaccgaaaacgctgctgattaacttccatctgcactggcgcgatcgcggcctgccgctgttgttcctcgaaggcttcctgctgatgggcgcttttgtgaccctgtttaactatattggctaccgcttgatgatgtcgccatggtcgctgaatcaggcggtggttggcctgctgtcggtcgcctacctgaccgggacctggagttcgccaaaagccggcgccctgacggtgcgctatggccgcggtccagtaatgctgttctttattgcggtgatgctgtttggcctgctgatgacgctattctcgccgctgtggctgattttcatcggcatgctgctgttctccgccggcttttttgccgcgcactcggtcgccagcagttggatcggaccacgcgcgcgtcgcgcgcgcggccaggcatcctcgttgtacctgttcagctactatctgggctcaagtattgcggggacgctcggcggggtcttctggcatcattacggctggaacggcgtcggcggctttatcgcgctcctgttaatggccgcgctgctgaccggcgcctgtttgcacaaccgcctgaaataattgttaaacgacgtgaccttattggtcacgtccgctcaccacagcccgagtaccgatggcaaccccaacagttctctgagagcatccatagaaagcagtgcgaaaaacacccacgtgaacggattcatactcgcctccgctgacagccagcgcctgtaatcagtgtagtcgctggcgatgcgcgccgtccgtcatggaattcacatgcgcatttttcgccgcacgcaaaatgtcgttcccgcgactcgaccaaatcacgccgacgcgctagtgtacccactgacaacagatttatttcactcgccacaggccagcagagactatgactgaaaacaacaactatcagcagctcacccgcactttccaacggctctcccgcttctctcacctcgccgccatcgccggctgggatatgttcgccatgatgccgcccggcggcagccgcgcgcgcggcgaagcgctggccgagctgggagtgctgcagcaccaaattttgaccgataagaaggttggtgaatggctggaaaacgccctgcaggaagatcttaacgatctggaacaggctaacctgcgcgaaatgacccgtcagtatcagcaggcggcgctactgccggaaagcctggtggaggcgaaatcactagccggtagccgctgcgaacacgcgtggcgcagccagcgtccggctaacgactggcagggatttgccgaaaacctgcgcgaagtcgttaagctcagccgcgaagaggcgcagatccgtgccaatgcgaaaggctgttcacgctatgacgccctgctggatattttcgaacccgacatgaccagcgcgcgtcttgacgcgctattcgccgatctgaaatcctggctgccgtcactgctggcaaatgtcgttgataaacaggcacagaaaacgctgctcgagccacaggggcccttcgccatcgccgaccagcgcgagctgggctggaggcaatgcgggttttgggctttgattttgatggcggccgcctggatattagcgcacaccccttctgcggcggcgtgccagaggatgttcgtattaccacccgctataacgaaaacgatctgctcagcgcgctatttggcgtgatccacgaaaccggccacgcgcgttatgaacagaatctcccgcgtaactgggtcgatcaaccggttgggctggctcgctcaacggcgattcacgaatctcagagtctgttcttcgaaatgcagcttggccgcagcgaagccttcctcaaccgcctgctgcccgccgtgcgtcagcgctttggcgaccagccggcgttcagcgcggagaattttatcgcctggaaccagcgcgtaaagccgggctttatacgcgtcgatgccgacgaagtcagctacccggcgcatgtcattctgcgctatgaaatcgagcgggcgctgatcgacggcgatattgaagtagacgatattcccgccctgtgggatgaaaaaatgcagagctggctgggtatttcgaccctcggcaactatcgtgacggctgtatgcaggatattcactggaccgatggcggtttcggctatttcccttcctatacgctgggggcgatgtacgccgcacagttaatggcggccgccagacgcgcgttaccgaatctcgcgcaggatatcgccggcggcgattttaacgctctgttcgactggttgcggcaaaatatctggcagcacggcagtcgctttaccacttcgcagctcattaagaatgccacaggcgaagatctcaacagtgagtatttccgccagcatcttaccgcgcgttatctctaagcctgcgcgccggggcctgctccggcgcgttatacccgtttgcttcgcattgtacatatggttacacgccgataccaaacactcacggaaagctcgaaaagacaagcatatagttacttcaacggccccgcagtggggttgaaatgaagaaaccttttcgaggatatcagaatgaaaaaagtattagctctggtcgttgccgctgctatgggtctgtcttccgctgctttcgctgctgatgcagcaagcaccactcaggcacctgctgctgcaactcacagcaccactgccaagactacccatcataaaaaacaccacaaagctgccgccaaaccggccgcagaacagaaagcccaggctgccaagaaacacaaaaaatccgcggctaaacccgctgtagagcagaaagctcaggctgcaaaaaaacaccacaaagccgccactaaaccggccgcgcagaaagcccaggctgccaaaaagcaccacaaaactgccgctaaaccagtagcgcagaaagctcaggctgcgaaaaaacaccacaaaaccaccaaacacaccgcagctaaacctgctgctcagccggctgcctaatctttccggttagtctggtcttgtataaatcggcgctgtttcagcgccgttttttctggagagcgctatgctgcgacgctatcgttttgagctcatcctgatactgctgataatctgcgcgctagtggcaacccgctttttcctctattaggcgccgctaatcatctccctcaataggaaaaccggcttcacgaattgcctgacggcaatcgctgactcccgcagcatatcccgcttcaatttcgcataccgggctcgcactggagaaaggtaagcgaatcggcgtcgccagttgacgttccagctcgcaaatttttagccgcgccgccagcaattccttcgccagttctgggggcgacacttcggttttttcccccgtaatgatcgcccgcaattgcttctcatcgataatcatcatatccgccagtttgcattcattgacagatattatagccaacgccacctcagtggcgttggcgtgccgctacatggcacgtaccgcctcaatcacgagatagcccatcgctccccacataaaaaaagaaaccagcgaaacataaactaatgcgcgaataccttgtttagacatacaccctcccactacgggaaatgaccttgcgcttataatggccgggacaacctcacatttcactcaacaggaatcgccaatgacaatgtttacagtgagaaaatgtttcgtagtgaaaataattgagaagatggtaaaaaaacgccaatgacgatgaacttttgcgatcttcaggcgactaaaacaccctcgaaaaaattgcgctttgcgaatgtcctgtaaggcaaagtgattattttgccgtcgttttacgtacgttccgatacacgaattatgttgcgttgcacgccgctttctgcggaaatgacaacagcagagataatgcgttaaccatctgaattaacatggttcttgcatagatggaatgtcttcaggagtcattttaactgccgtttggcttaataaaaattattcttaactttcataaacttaaatctcctgctactttcaatagacataattatctccccagagagtgatatgcgtagagacgtactgttattactgtgttcgttttgtgtatttcccctgtttactcatgccgatgatgacggcatgagcgcgaaagatatcaaaacgctttttttcggccatgacgatcgtaaagcggtcagcgatccggccagttccccctgggatgccatcggccagttagaaaccgccagcggtaatctgtgtaccgcaacgctgatttcaccgcatctggccctcaccgccggtcactgtttgctgcaaccgccgaaaggcaagccggacaaggccgtcgcgttgcgttttatctcgcgtaagggcaattgggtctatgaaattcacgggattgacggccgtaccgacccgtctttgggtaaacggcttaaagcggacggcgatggttggattgttccctcttccgcagccccctgggactttggcctgatcgtcctgcgctacgcgcccggcggcattacgccagttcctgtgtttcgcggtgataaagaagcgctgaccgcggcgctgaaagcaacggaccgcaaagtgacgcaatccggctacccggaagatcatctggatagcctctatagccaccaggattgtctggtgacgggatgggcgcaagcctcagttctgtcacatcagtgcgatacgctaccgggcgacagcggttctccgttgctgttaaaaacggacaacggctggcaggtcattgcggtgcaaagctcggcgccggggccgaaagatcgctatcgcgccgataaccgggctattgccgtgaccggttttctcgacaagctggaagcgctggctaacgagtgatgatccctgccgcgcgccagttctgccgcctgcgaacgcaggcggcatcatatcaagccagtttaatcaacaccataccggccaccagcagcacgacaccggcccagcctttatggttcagacgctgtccaaagaggatccagcctgcggcgatagtggccgcaatcccgaatccgccccacagcgcataagcgacggataggtcgatacctttaaccgcctgcgacagagcgctaaaggcccctaacaccgccgccagcgacaggataccgtaaattttacgacgaaaaccgtcggagaatttcagaaatacgttcgcggtaatttccagtatgatagccagcgccagccaggcgccgtgaatccactcaaactgttgcatgagcggtctcctcacgctgtttcaccgctttctttgtgccagacttaatcagcacaatacccgcgaccagcgttgccagcccggcaagttttacgatagacaggctttcatcgaacagcagcacgctaaatacggtaatcaacaaaataccgataccttcccaaagcgcatacgccacaccgagagcaatttttttaacggcgaaggccaggaaaatatatgaaagcgcaatcattgccagcattaaaatataacccgtatgaccgccgctgacgcttgcccatttcatagacaacgtgccggtaatttcagcgacgatagctaaggctaataaaatccaataaaacataatcccttctcctgcttgagaatacaatccatgacggcttacgagggtaaaccgaaaaaattctgacgtagatttagccgtgcgcggtgcgccagctcaggcagagagaatgggactatagcgcggagcgccagtgctgttcgccagcaaatcgggagataatgaaaggtaatactagatgagtcgaaaaataaaggctgaactgattgttcataaaattacaattatccgcggtgttgcttctcgtcattgcggaaaaaaattgtcctcggtagttaaacacaccttaatttgtaccatagtgctacaaataactcaaagtctttgcaattctttacgtctggcgtctaatttcaattagcattttctcaaactgatcttcatcataaaagcgcatagtaaagtcgctatgatcagggatgtattttatcttcatcacaaggaacccaatggccaaacctatcatcacccttaatggactcaagatcgtcatcatgctgggcatgttggttatcatccttacgggcatccgttttgccgccgatattatcgtcccctttatcctggcgctattccttgcggtggtgatcaatccgctggtccagttgatggtacgctgccgcgtgcctcgggtgctggcgatttctctgctggtgggtgctatcgtgctgctggcggtggtactgctggcgtcgcttgggacatcgcttaacgaactggcacgcactctgccgcaatatcgtacttcgctggccgagcctttaaaaacggtcacgccatggctgcaacgctttggatttaccgtctccgccattgagctgaataagtatatcgatcccaatgcggtaatgacgctggttaccagtctgctgacccagttgtcgaatgccatgtcgtccatttttctgttgcttctcaccgtggtatttatgttgctggaagtgcctcaactacccgccaagctccagcagctaatgtcgcggccggttgagggatgggcgccattcagcgggcgattgatagcgtatcgcactatctggtactgaaaaccgccattagcctggtcaccgggctggtggtctggggcatgctggtactgctggacgtccgcttcgcctttatgtggggctgctggcctttgcgctgaactatattcccaatattggttcggtactggcagccatcccgccgattctgcaggtgatggtcttcggtggtctgtacgaggcgctgctcgtcactgccggctacctggtgattaatctggtgttcggcaatattcttgagccgcgcattatgggccgcgggctggggctatcgacgctggtggtattcctgtcgttaatattctggggctggctgcttggcccggtcggtatgctgctgtcggtgccgttgaccatcattgtgaaaatcgcccttgagcagaccaacggcggacagagcattgccttcttacttagtgatttgagtaaagaataaccgacaagcgggctggtttatccgccagcctcgccctcctttcatcttttccgcttagaccgttactccctttttattattgatccccatcacaaatgggcatatccaatcattactctaaggctaacgatttgccggcgtgcttaattgatgcgccgcgccgcgcatcgcacactaacttccaccaggacaaacgaaacgatttgtcgaatcaggaggttaacaatgaatgctgaacaaacgacgggacgggtctggaaccgtcgccggacggaaaaacagcggcggctggccgaaacgaagattgccggcaaagtcatccccactgaccaactggtcagcgtactggaaaatctgctcgcccctggcgaccgggtagtactggaaggtaacaaccagaagcaggctgatttcctctcccgtatgctcgccgaggtcaatccgcaaaaaatccacgacctgcatatgattatgccaagcgtcgggcgcagcgagcatctggacctgtttgaaaaaggcattgcccgcaaactggatttctctttctccggcacgcaaagcctgcgcatctcgcaactgctggaagacggcctgctcgaaatcggcgccatccatacctatattgaactctactcccgactgtacgtcgatctgtcgccaaacgtcgcgctgattgccggttataaagctgaccgcaaaggcaacctgtataccggaccgagtactgaagatacgccagcgctggtggaagccgccgccttccacgacggcattgtgatagcccaggtcaacgaactggtggacgacgaatgcgatctgccgcgcgtcgatattcccggctcgtggatcgattacgtggtggtcgccgacaaaccgttcttcattgaaccgctctttacccgcgacccgcgtctgattaagcaagaacatattttgatggcgatgatggcgatcaaaggcatctacgcagagcatcaggtgcagtcgcttaaccacggtatcggctttaataccgccgccattgaacttctgctgcccacctacggcgaacagctcggactgaaaggcaaaatctgtaaacactggacgctgaacccgcatccgaccttaatcccggcgattgagagcggctgggtggagagcgtgcactgcttcggcggcgaactgggcatggaagagtacatccgcgcccgcccggatatcttctttaccggcccggatggctcaatgcgttccaatcgcgccttctgccagctggcaggtcagtacgcggtggatatgttcattggttcaaccctgcaggttgatggtctggctaattcctccaccgtcacccgcggccgcctttccggcttcggcggcgcgccgaacatgggccacgacccgcacggacgtcgccacgccaccccggcctggctcaatatgatcactgaaccagacccaatgcagcgcggtaaaaaactggtggtgcagatggtcgaaaccttccaggccggcgtaaaaccaaccttcgttgaaacgctcgacgcggtcgacgtcgccaaaacctccggcatgccgctggcgccggtgatgatttatggcgatgacgtgacccacgtgctgacagaagagggtatcgcctacctgtaccgcgcggagagtcttgaagagcgccgggcgatggtcgccgcggtggctggtatcaccgatattggcctcggggtggacgccaaacgcgtcgccgcgctgcgccagagcggcaaagtggtgtacccggaagatatcggtattcgccgcagcgatgccacccgctcgctactggccgccggcagcgtcgccgacctggtggagtggtccgacggactgtacaacccaccggcaaaattccggagctggtaatgaaaaatctctccccctacacgcagaaagccgcgtcagctggctggcgcataccgccagcgcgtgtctgattgacgaagcccgtctgagtccgaaaccgggtctggtcgatagtcgcggcaacggcgcgcatcaggatctcaatctggacctgatggaacgctccgcccgcagcctgcagccaacctttcacgctctggcgcagcaaagctggcagcgtccggttgatatcgccctgcgagaaaccgtcggacgcctcggtcgcgaaggcgaagcgcagatgatgatggccaccggcggggtcaatacccaccgcggagccatctgggcgctgggcctgctggtcagcgcggtggcgatgttgggtggagagggtcaatcacaggcgatcgccgggaccgccgccgccctcgcccgcctgccggacggcttcgcgccgaaaagctttagtaaggggctgcgcgccagccgccgttggcaggtgccgggcgcacgcgaagaagcgcagcgcggatttccgcatgttaccaccctggcgctgccgcaactgcagcaaagccgggcgcgaggcgccagcgagcagcaggcgcgccttgatgcgctgatggccatcatgacctcgcttagcgatacctgcgtgctgtcgcgcgccggcatgaacgggctgcatgccatgcagcaaggcgcccgcgaggttctggcggctggcggttgcgctagcgtcggcggtcgcgccgcgctggcgcgccttgatgcgcagatgctggcgcaaaacgcctcgccgggtggcgcggccgatcttcttgccgccaccctgtttctcgaccgggtttccggctaacgcattcagaggatgttatggaacagattacattgtcatttcctgccaaccgcgccctcagcggcaaagcattggcaggggtcgtaggttcaggcgatatggaagtgctttataccgccgcacagagcgccacgctcaacgtacagatcaccacctcagtggataacagccaggcgcgctggcaggcactgttcgacaggttgaacctgatcaacggtctgcccgccgggcagttgattatccacgacttcggcgccacgccgggcgtcgctcgtattcgtattgaacaagtatttgaggaggccgctcatgcgtaacgatcgcagctttatcgaactgcgcgctcgcgaacgcgcccacgccctgctggacgacggcagctaccgcgaactgctggatccgtttgaaggcattatgtcgccgtggctcggcgcgcagggcatcgtcccacagtccgacgacggtatggtggtcgccaaaggcacgatcaacggccaacctgcggtggtgattgccatcgaaggcaccttccagggcggtagtatgggcgaagtctccggcgccaaaatggccgctgcgctggagctggcggcggaagataaccgcaacggtatcccgacccaggcggtactgtgcctcgaaaccggcggcgtacgtctgcaggaggccaacctcggtctggccgccatcgccgatattcacgccgcgattgtcgacctgcgccgctacaccccggtggtcggcattatcaccggtaccgtcggctgcttcggcggcatgtccatcgccgcggcgctgtgcagctaccttatcgtcactcgtgaagcccgtctcggcctcaacggcccgcaggttatcgagcaggaagccggcattgaagagtatgactcccgcaaccgtccgtttatctggagcatgaccggcggcgaaattcgcgccgccagcgggctggtagacgcgctggttaacgatggcgttaacgccgttaaaaccgcaatgaacgaggccatcgccaaaggcgtaccggtacagcaccgcagcgacaactatgacgattatctgcgtcgcttgagccagttcgatacccgccagcaggcggataccgcgcagattaaacagctttttgcccgggaggataaataatgagtcagttcccaaaccgcgccgcgctgtggctgaataaactggcgcccgacgcgccgctgatgagtggtctgtgcccttcggtgcaggtcgcagatggccagattgatggcgaaagcgtccgctttatcgccgtggtgcctgacgccaacaaccactacccgcgcgccgccggcggcgaagtcggactgctggaaggctggacgctggcgaaagtggtcaacgaaaccatcgccgccgacgccgatcagcctgtcaaacggccgatcgtcgcggtaattgatgtcccaagccaggcctatggccgccgcgaagaagcctttggcatccaccaggccctggccggtgcagcaggcgcctacgccaaagcccgtcttgccggccacccggtgattggtctgatcgtcggaaaagcgatgtccggggcgtttctggcccatggctaccaggccaaccgtctgatcgcctttaacgacagcggcgtgctggttcacgcgatgggtaaagaatcggcagcgcgcattacgctgcgtaccgtagaggcgctggagaaactggcggcgacgatcccgccgatggcctacgacgtcagcaactatgcgacgctcggcctgctctccgccctgctcgatatcaaccatccggatgcgccagacgaaggcgatctgtcgctggtcagccgtaccctgcgcgacgccatcgctgacgcgcgcaccgatacctcactgaagtgccgcctgggcgcggaaaaccgccgtagttcacaactggttcgcgatcgcatgcgcgccagctggtaagacgttcgtacgtaagtagtagaagaaaacctgccggaagcagtctcccggagcgtggaataaacgctccgggaagggacggcttttagaaaaaataacaatcgcgccagtactctattttatttacaggtgatttatgacttatgtgattattcatgctcttgccccgattttcgtcattatgctgctgggcttctgggccggtaaggccgggatggtagataataaaaatgtctccctactcaatatctttgtaatggattttgccttacccgccacgctgtttagcgccacggtacaaacgccgtgggccggtatcgtcgcccagtctccgctggtgctggtgctgaccggcgcgatgtggatcacctatgccgcgatctacttcctcgccaccagcgttttcaaacgcacgccgcaggatgccgcggtgctgaccctcaccgtcgccctgccaaactatgccgcgttgggtctgccgatcctcggcagcgtactgggtgaaggcgcgtcaacctcgctgtcggtggcggtctctatcgcctgcggctcggtactgatgaccccgttctgcctgctgattctggaacgtgaaaaagcccgcgccgcaggtgaaaacagcggttctacgctggcgatgctaccggtgctgatgtggcgttcggtgaaaaaaccgatcgtctggggcccgctgcttggggtggtgctttccgctatcggcattaaaatgccggacctgctgttggcatcgatcaaaccgctgggcctggccgccaccgccgccgcgctgttcctcaccggggtgatcctgtcggcacgtaaactgcagctcaatgcgctgatcgccacatcaaccatcgtgaaactgctggtgcagccgtttattgcgtggggactggtgatgttacttggtctgcacggttccattgccattaccgcaatcctgatgattgcgctggccgccggcttcttcggcgtggtcttcggcaaccgcttcggggtgcaatctccggatgctgaagccgtgctgctgttgagctcggttctgtgtatcctgtcactaccgctgtttatctctttgacttcaggactgtaaaccatgtcatcaacgccgcgtccccacgatttagtttggttaaaccacgccagcgccctggaagatattgccgagccgtgggtggttcagcagtggcgagccgcgctgccggtggtggtgaggcgcgacgttgacggccaggctcgcatcccggttggggtgcggggcatgaagcgcgaacagcgcgccgccggttgggtacaggcgcacaatatcgtgcgcagcgtcaccccggagatgcttgtcgaacgcgaagcattactttgctcgccgtttgtctcgcagccgccgctccaggcggctatcgccctcaccttacaccgctggccctggggctggggcgtcaccggcagtaccggctacgcgctggcaaccgaaattccggtgctgcatgcggcaagcgatctggatctgctgatccgcgcgccgcagccgctggaccgcgaggcattgctggaatggcaggcccgcgtggcccaattaccgtgccgcgccgatacccagatagaaacaccgtacggcgccttcgcccttaatgagtggctgcgcgatggccgcgcgctgctgaaaacatcccgcggcgcgcgcttaaccgcgacaccgtggcacagggaggaatgatgaaaattttgtttacttttcccggtcagggcggccagcgccccgcaatgctggcggcaatccccgatcgcgaggctatcctcacccaggcgcgcgccgtgctgggggatgaagtcgataccctcgatagcgccgacgcgctaaagcatacccgtgcagtacaactctgtctgctgattgccggggtagcctgggcgcgcgaactacagcgccagggcgtggatccgcagatggtcagcgggctctctatcggcgcgtttccggcagcggtgattgccggcgcgctcgatttcgccagcgcgctgcggctggtggcgctacgaggcgatttaatggagcaggcttatcccgaaggttacgggctgacggcgattatggggctgacccgcccgcgggttgaggcgctgatgcagggccacgaggtttatctcgccaacctgaacgccgaaacgcaaatcgtgatcgccgggcgcgatgaagccatggccgaggtggcgcagctggcgctacaggctggcgccagtaaagcccaacggctggcggtcagcgtgccgtcgcactgcgcgctgttggataaacctgccgcagccctggcaaaagcctttgccgacgtcaccttaacgcgccctcagcgtgcctatttaagcggctcgacggcgcgcgtgctgtgggatccacagcggatcgccgacgatctggcgatgaacatggcgcgcaccgtacattggcaggaggcgatgatcgccgccgatgaacgcgacgcgaggctggcaatcgagatgccgcccggcggcgtgctcacctgcctgacccgccaggcgggctggcgcggcgagacaatttcgctggagcgcagcggcgtagacgtcgcccgccatctggcgcagcggcttaacgattaatactgcgggcgtacatgcgcccttccgccgccagcgccagcaggtcggcatcgcgctcgcgatggtgtgaatagacgatagagatcagctggcgcatctgatagggttccgccagctttaacagctgcacatcgttttcgtaaaccttcttcatgcgccccggcaacagcgcaaacccgacgcctgcctgcaccaggcttatcatcgaaaagatatcattcaccctggtcacgatttccggctcaaaaccggctacatgaaaggcctcctgaaatccggcataagtcgcaaacccttccgccagcgagacaaatttacgatcggcgtaatcgcgcagatcggcgagctgagtggtatccagctgttccgtcgccggcgcggcgaggaagatatcatcttcaaacagcggcaccacgtcgaaagccgaattattgtactcgccttcattggtggcgattaagatagcgtcaagggcatcgtcttccagcatatccagcagcatctggttggaacccatcgtcagatccagttcaagctccgggcgacgtaatttcatccccataatgatgcgcggaacggtttccagcgtcagcgaatagagagtaccgatgcgcaaccgcccctgaccgacgccggcgactttacgcgtcgcctcaagcccacggctcatcagactcatcacatcctggcagtattcaagcagcgtccacgccgcctgcagcggcagcagattgcgccctttgtggacaaacagcgggcagccgaccccctcctcaagagtatgcagcgcgcggtgaacgctaacgctgctgagcttcatggcttcggcggttctggcgatattgcccttcgccataaacatcataaagaccgatagcttgcggaaggtgatctcctggttgatatcgtctttcataacccttccacacccctggtttaattttcttatttcaattcaaaccagtatatcttttatgacgtcaaagttgcaggctgcgcgcggcgtcagccggtaaataacgcaaaaaagggaagaccatggtcttccctttcgttcactgcctgaatgcgtcgttacagcgccatatcgtgctgcggcgaggcttcgcgcggcggctcagccggtttggcggtcgcggtcggcgcggactctggcatctgaatgaccggaggcttggtcagttgcagcgccgcggcggtatcatcccaaacctgctgggtcagcgccacgttgccgtttaacttctcaccgtagctcggcacgatagcgcgaatgcggctctgccattccggcgagctaaactgctgcgggaacatctgcttgagaacgttcagggtgatcggcgcggcggtggaagcacctggcgatgcgccgagcagcgcagaaatcgttttctgctgatcgaccactacttcggtaccgagcttcagaacgccgcccttctccgcgtcttttttgatgatctgcacgcgctgaccggcctgaatcagtttccagtcttctttacgcgcgttcgggtagtactctttcagcgccgcaaagcggtcatcatcgctgagcataacctggctaaccaggtacttcaccagatcgaagttgtcgaggccaacgtgggtcatcggcagcacgttgctggtggtggtcgtgctcagcagatcgaagaacgaaccgtttttcaggaacttggtggagaaggtggcaaatggcccgaacagcaccacgcgcttaccatcgaggtaacgagcatccaggtgcggtaccgacatcggcggcgcgccaactgaagcctgaccataaactttctgctggtgcagtttagtcagctccgggttctcggtcatcaggaatgagccgcctaccgggaagccagcatagttgtccgcttccggaataccggttttctgcagcagcttcaacgcgccgccgccggcgccgatgaagacatatttggcgtcgatagcctgctcttcaccgctcttcacgttcttaatcgtcacatgccaggagttgtcggcattgcgtttgaaatcggtgacttcagaagaggtctgcagcgagaagttgctgctctttttcaggctgccgatcagctgacgggtaatttcaccgtagttcacgtcagtaccgaccggcgtccaggtcgcggccactttttgctgtggatcgcgtccttccatcaccaacggcgcccactgtttaatttgcgcgtgatcggtggagaatttcattccctggaataaggtggtctgctgcagtgcgttataacgcttttgcagataatcaacattatcgccccacacgaaactcatatgcggcgtggaattaataaacgagtgcgggtcgtgcaaaataccgcgtttaacctgcgccgaccagaactggcgcgaaatcataaactgttcgttgatatccagcgccttgctaacatcaatagaaccgtccgcacgctgcggcgtgtagttcagttccatattcgccgagtgaccggtaccggcgttattccagccgttggaggattccagcgcgacgccgtcgagtttctccaccatcacctgtttccactccggctgcagttcctgcagccaggtgcccagcgaggcgctcatgatgccgccgccgatcagcagaaagtcagtttttttcgaggtatcgccattagcataggtcgccgtactgacgaacatcgctaatgcggtcatagatataatcgtttttttaattgcaggcataatagaaatatcgcgtagcaaaagtgtaataagagccatcatattaacgcacttttactttattttaaaatatcatttacacttcgatattttaatcaaacagttttttaacttaaaaaagcagattatttatttcacgggcattcattgtgaaaatagcggcggaaaatcaggattattcaggcgataagaaatatggcgccggtttatttagttatttaacaaaccggcgcggcgaggagattaattaacgttactgagcgttttctcttgcgcttcacccagggcgacacgcaaatggttgttgttttcgcttagcagatcccgcgcctgccaggcatcgagccccgtcatcagcatcagaatcgccgtccgacaatgctgattgcaactggccagcgcggctttggcttgcgcgcgcgtacactctgtggcggccatcaccatggcgatttgccgctcctcccagcgcgggctggttgcctgtagatcaacacgcaggttgccgaacactttgccgctgcgtaccgcaaggccggtagttaacagggtgaggatctgccgctgcgccagttgcgctttcgggttgccataacccgccaccgcttccggtccggtctgcggcgcaatcataatatccgccagctgcgcggcttcgctatcaggctgctgcgtcaggatcgcaatcggcgttcccagcgaccaggcgtgacgcatggctccccacacccacggcgttttgccgctgacggtgagcgccagcagcatatcgttggcgctcagggacaatagctgcatatcccgtaagcccgcgtcataatcgttagccgcccgctcggcggcctgcagcgggctcccttcgccaccggcgatcatcgccaccagtgagtgattggcttcaggggaatagtcattaaccgtttgcaacgccgcctgcccggatgccccggcgccaatgatcaccagccgtcctccccggctcagggtcgccgcggcgttatccaccagccgggtaatctgcggcaggcaggcatcgatggcaacggctatctgtttgttatcctgctgcagcagggtcagcatatcgagggtggcgagcgtatcgatatggcgcgtttgcgggtggcgtcgttccagcattgatgcggttggcttactgctcataaaacctccatttaaaaccgaactcactgcggcgaaatcaatagcggtgacatatccattcattcatcacggctatttgattgatgcagccagtgtaaagccttcattcacggctttaccgccacgggggtcacagtttgttcacccgacacctaatcgcggcgcgattgcgcgttatccgagcatgagggctacgcatgtcaggcagcggatacccagtacgccggttttactgttattacacggctttatgaaaaccgccctatcggcgataatgatcgttcaacgaatcgatcggggttgtcatgaaggaagccgagctacagccgcctgcccgcaagcgcgcccgcagcctgaaattaagtaccgccgtcacgctgatgattggcagcgttatcggcgcggtgctgctgctggtctacacgctatggtttatgcaaatcagtaacgccacccgcgacggcttaaaagagacggcgctggcggtggcgcgcaccatggccgatatgccacaggtgaagcgcggtctcggcgagcctccgcagagtaatatcattcagccgctggcgcaggccattacccgtcgtaacgatctgctttacgcgattgtgaccgacatgcgcggcattcgctattcgcatccggatagcgccatcatcggtaaaccctttatcggcgaggatatccgcccgacgctcgccgggcgggaaaacgtggcgattaaccacggcgtactggcgccggcgctgcgcgtgtttaccccggtattcaatgaacagcatcagcagataggcgtggtagtggtaggtatttcgctgagtaaagtcgacgaacagatcgccaatagccgctgggacgttctgctgaccatcctgttcagcgcgctggtctgcgctatcggcacctggagcctggtgcgcggcttaaaacgtattctgctggggctggagccgcaggatatctccacccagttccagcagcgtcaggcgatgctgcactcgctgaaagaaggggtgatcgccgtggatagcagcggccaggtcacgttgattaacccggccgcccgcggcatgttactcagcgggccggataaaagcatcgatcgcaccccactgctggccgacctgcaggaagttctgcgcagcggcgagcctatctatgaccgagcgctcggctgtaatggcctgttgctgatcagcaataccgtcccggtgcgcagccagaacgccatcgtcggcgcgatcagcaccttccgcgataagaccgagatgagtcaactggtgcagcggctggacggtatgatgagctacgtcgatgccctgcgcaccacttcgcacgagtttatgaacaagctgcacgtgatcctcggcctgctgaatatgaaaagctatgacaagctggaagaatatgtgctgcaaaccgcccatgcctatcaggccgacatcggcgaaattcagcaccggataaaatcgcccgtggtcgccggcttcctgattggtaaaatccagcgcgccaaagagcgaggcttcacgttgaacctcgccgaagagagcctggtgccggattgcccaaatgaaaaacaggtcaccgtgctggtgacggtgttgggcaatctgattgaaaatgcgctggacgcgatgagcggtcaggaggaaggcgaagtcagcctgctattgcactatcaggatggctggctaagcggtgaattgagcgacgatggcccggggatcccggcggccaatattgacgccatctttaataagggcttctctaccaaaggcgaaaatcgcggcgtcggcctgtttctcgccaaccagcagctccacgaactcggcggcacgttgtccgtcgagtccgagcctggcgtatttacccaattttttgttcacctgccctgggatagtaaaaggaaaaaagcgtgataaatgtattaattgttgacgacgatgcgatggttgccgagctgaaccgcctgtacgtggcgcgcatccccggtttcagctgctgcggcaccgcgtcgacgctcggcaaagcccaggagatgattaatgacccgcagatggcgatcgatttggtactgctggacgtttacatgcagcaggatagcggcctcgatctgctgccgaccattcgcgccagcggccgtgccatcgacgtgattatgataacttccgccgccgatgccgccaccgtccaaaccgccatgcactatggcgtggtggattatctgattaagcccttccagttcccgcgctttgaagaggcgctgaccgcatggcgtgaaaaacgtaaactgatgaccggccagccctattacgagcaggcggatgtcgatcgcctactgcacggcggcacgccggaagcggctgacgcgcgtaagctaccgaaaggcttaacggcgcaaactctacgcacgctgtgccagtggattgatagccaccctgatgtggaattctctaccgatgagctggcggcggcggtgaatatctcgcgcgtctcatgccgtaagtatctgatctggctcgcgcagatcaatattctctatacgaccatccattacggcgcgaccggccgaccggtgtatcgctatcggctggttgccgaacagtacggcctgctcaagcagtacagtcagtaatctggtagccgctgtcgagtagctgaaagcggatgcgctgcggtgacgacagaatcacgtcgcggtttttggtgacaaaaatcgcttcaatgtcgtcccgctggcgcagcgccgcacagcccttctccacgccaaggccatacagcaatgtggtccagatatcgccgtccagtgaatccgcagaaatgaccgttacgctgtcgagttcgttatccaatggatagccgctgcgcggatcgagaatatggtgccagcgtttgccatcctgctcgaaatagcgttcataggtgcctgaagtgacaaccgactgcccggtaacggcaatcgagccgataagttcctgcgccgcggcaaagggttttttcagcccaatcgcccattcccctatcgtatgtacattgccgccgaggttaatcagcgcctgttcgctcccttgctggcccaggtaatcgtgtacccggtcggcgatatatcctttggcgattgcgccaaggtcgatttccattccggcctgcgccagccacacgctctgcttttcgtcatcaagaatgacatcctgcgggcgggttaacggcagtcgcgccgcaatatctgccgccgacggcacgctatgcccctgaaagccaatgcgccacagtttaaccagcgggccgatagccagattaaaggcgctgtcgcgcaccatactggcggctttagcgcacttaatcagctgatacaccggacggctaacggtaacgggatgacgcccagcggcatggttgatatccattacctgcgactgcgcgcggttcacggtaagcagatcttcgtagcgtttaattagctgaaatacgcgggaggccagcgcctcatcgtgggaatagagtttgagcaggatgggcgagcccatcaatacggcggagtagctatagacgcggttatcggacatcgggctctccttagaagggataagccgggcggctaagccagcccggcatcagcaattacctattatcctctggcacgtttcgccgcctgatggcccgcgagagtaccgaagatgatgatatccgcgaccgcgttaccgccgatgcggttaccgccatggataccgccaaccacttcacccgcggcgtaggcgccgcgaatcggctgctgcgccacattcagcacttcgccatcggtattaatggtcacgccgcccatagtgtggtgcacccctggggcaatacgaatggcgtggaacgggccttcgttaatcggcgcgcgcagcgcggttgtgcggccaaacgcttcatcgtgctgtttttccaccgcgccgttgtagcattccagcgtagcgaggaacgcatggtaatccatccccagcttctccgccagttcacgcggcgagctggcgctggtgacgaagcctttggcgatatactcgtcggcagctttgtttttcgcccgcacatgctcgtcgaagacgatgtaagcatagtgttccggcagcgcgataatcgccgcagacactttatcgcgggtctccatctcgttgaagaagcggttcccctgctggttaacgagaatagcgccgccgccgcgaatcgattcggaaatcaggtacgaggtctgctgctcgacggtcgggtgaatttgaatttcgcccatgtccacggtgccggcgccaatgcgctccagcagcgcaataccgctaccggtcgcccctttatggttggtggtcacgaagccttcgaggtcaggacgatatttcaccaccatcgcgctgttggcgctgaagccgccggttgccacgatgatgcttttggtctgcacttcgatgatctcttgttcatcgttgatgagacgcacgccgctcacttcgtcgtggtgcatcaggatctcttctaccgaggtatccagcagtacatcgataccgcgtttggtgatattacgcaccagaccgctaatcaggtagccgccaaccgccgatccgtcgcgcggacggtgtgtacggtcgatactcatcccgccggtggtagtgatatcgttaagcataatcccacggtccgccagccattcaatggcttgcggcgcgttttcaacgaaacggcgcagcagctgcgggttgtttttgttgtggccgcccttcagggtttcctggtagaacaactctttactatcctgaatacctttgacgcgctggaagcgggtttccgcggcgttcatcccggcggaagctttgatggtgttgccgccaatagtcggcattttttcgacgattagcacgctggcgccttcgtcgtgggcctgaatcgccgcggctaaaccggcgccgccgctccccaccaccacaacgtcatagcttttcggcgcggcatcgttgccgccctcttccgcagccagcgctttgctggatttcagcatcgctttggacaccgcttttttcaccgcttcgctctggctggtcgcgccggagatagcgtctacgtgcggcgtgttggcagtcagaatacgttcgcggatctcttcgaagctggtggtaaactcgacgctctgcaccgggctggcggccagctcgatatccgcaatgcgatcgttttcgaggctgacgttaatggccagttcgttggcatcgtcctgaacggtttcgacaaacatccctggtttaaattttgcgtcgcccatactcatgtcgcggatcatcgcttcgaccagcgagaaacgccacagcggctccggaatatgcagcgcctcgcgctgggtgctgtcgataaagagttccagctcttcgccggcggcgatacgtgaagcccagtccggataagcgatgcaggcgcggccgacggccatcaggtcataaccgtgatcgaggccctgttcggcgtcggctgcgttaaccaccccgccaacgcccattaccggtacctgcgccagcgtttcagaacgcatggcgcagtatttttcaatcagcggcgtcggatcgctggtatctacgatagacgggcgcagcgtcgcgccaaccgagaagtgcaggtaatcaacgccgcgggcggccagtttctccagcagatacatggtgtcgtcgaagcggatccccgggatttccatctcttccggcgagaagcgatagccgataataaaggcatcatcagcgtactgacgggccattttatgcgtaatgtccagtaccgccaggggaatctggcgcggttgtcacgactgccgccccactggtcgtcacgctgattggagttcggcgaatagaactgttgaataagataggtgttggcgccatggatttcgacgccgtcgaaaccggcgagaatggcgcggcgaacgccgtcaccaaatttggcaatcatgccctcgacttcttcaccactgagggcgcgcggcatggcggcgccgtcgcgaggcgcggcaatggcgctcggcgccaccggctggcgaccaccaatcaactgtgggtcaaccatgcggccgccgtggtaaatctgcagaatcgcttttgagccttccgctttaatcgcttcggcgattttcgccaacccggcgattttttcatcgttatcgataccgatagcgccagggaaggccagaccataatcatcaataaagcagcattcaacgatgatagtcccgatgctgccggcgcgggcacgatagtactcaacgagctcgctggtgacggtaccatcgtaataaccggtgcaggtggtcattggcgccattagcaaacggtttttcagttcagtcccattcggtaaagtaaatggctgcagaattcgttcgttactggtcatattaatactccagattttaaatattgaaattcagaattgggtgacggaaattttattggttgtttattttcattcctgttgtcatgccaataatatagcgcgttttttagttaccaaattaattacgttagttaaaaaactatttaatacctgcaataacagcaatacctccattgtattattaaatttatataccgcatttacataatacaaatgagtgataacatttcagtcacttttgttaacgtattaaaagcacaaggctgtaaaataaaatcaataatatcaattagttgaaataaaacaccgctatataaagcgttataagcctcgcgattatttaacaattaccgtttcttcatgataataaccacatcatcatatgtggttattgccaaacgaaaaaaaagatccagatcacctgttttttttgatctcgatcaattgcaatgcaacgtgaaagcgcaatatataaatacccaatgaatttaatttaacgcctcgataaacgcgttaaataaccgtttaagcaataagcaatctcgaccattaataattaaagaaactttcgcaactaaaaaaatcgagaattgtaagcgaagacggaaccgtattttcaactactagcagatactcattatgaaagagaaaaagacaaccataccgcctgccggtgccgcgtctaacgcggcgtataaacgtctgatcatgatggcgttgcccattatcgtcgccgtactgctgttgttcgtcccggtgcctgacggcttaccgcctttcgcctggcactattttgctatcttcgtcggcgttatcgtcggccttatcttcgaaccgctgccgggcgccgttatcggtatcaccggggtggtggtgattgctttatgtagccagtggctgctgttcagtccggaacagatggcggcgccgagctttaagctggccggcgcgtcatttaaatgggcggtcagcggctttggtaactctaccgtgtggctcatcttcggcgcgttcatgttcgccgccggctatgacaaaacccagttcggccgccgtctggcgctgattctggtaaaatatcttggccgccgcagcctgacgctgggctacgccattaccttcgcagacctgctgctggcgccgtttaccccgtccaataccgcacgtagcggcgggaccatctacccgattattgctaacctgccgccactgtacggttctaaacctaacgatccgagcgcacgccgcattggctcttatctgatgtgggtagccattaccgccgcctgtataaccagttccatgttcctgtcggcgctggcgcctaacctgctggcgctggcgctagtaaaaagcatcgtcggtatcaacatctcctggggtacctggtttatcgccttcctgccactgggtatcctgctgattctggccatgccgctgctggcgtactggttctacccgccagaagtaaaaatcaataacgaagtgccgctctgggccgctcgcgaactggagaaactgggcaaactgtcgcgcaatgaaatcctgctgctggtgttcgtctgcttcgcgctgatgatgtggatcttcgccgccgactggattgaaccggcgctggctgccctgctggttatcgtgctgatgctgtggaccggcgtgctgtcctggaacgatatcaccaacaacaaagcggcgtggaatacctttgtctggttcgctactctggtcgcgctggctgacggtctctcctccactggcttcatcgcctggctgggtaaagaaggcggcgcgctgatgagcggtatatctccgggcgttgcgaccatcgtcctgctgctggcgttctatctgctgcactacctgttcgccagtaccaccgcgcacactaccgcgctgctgccggccatgctgactatcgcttcgactatcccgggaatgaatatgcaagtcttcgtcctgctgatggtgacctcgctgggcgtgatgggcatcatcaccccgtacggtaccggtccgagcccgatttactacggcagcggctacctgccgaccaaagactactggcgcctcggcaccatcttcggcgccatcttcctggccgccctgctgctgattggctatccgtggatgtccatgatgttctgattcataaccgccgggtcttcccccggcggtttttatctttatggagtatgtgaatatgtcgacgaaaccctttgtttatcaagacccgttcccgatggcgcatgacgataccgaatactatttgctcagcaaagagcacgtctccgtcgccgaattcgcgggccacgaagtattgaaggttgaaccgcaggcgttaactctgctggcgcagcaggccttccacgatgccgcttttatgctgcgcgtctcgcatcagcagcaggtagcggccattctgctcgacccgcaggcaagcgaaaacgacaaatacgtcgcgctgcagttcctgcgtaattccgaaatcgccgccaaaggcgtgctgcccacctgccaggataccggcaccgccatcatcatgggtaaaaaaggccagcgcgtttggaccggcggcggcgatgaagccgcgctggcgcagggcgtttataacacctataccgaagacaacctgcgttactcgcagaatgcgccgctggatatgtataaagaggtcaacaccggcaccaacctgccggcgcagatcgatctctacagcgtcggcggcgacgaatataaattcctgtgcatggcgaaaggcggtggttccgccaacaaaacctatctgtaccaggaaaccaaagcgttaatcaccccggcgaagctgaaaaactacctcgtcgagaagatgcgtaccctcggtaccgcggcctgcccgccctatcatatcgcctttgtgattggcggcacctcagcggaagcgacgctgaagaccgttaagctggcttccgcccgctactatgacgacctgccgaccgcgggtaacgagcacggtcaggcgttccgcgatgtgcagctggagcaagagctgctgcaggaagcgcaaaatctcggcctcggcgcgcagtttggcgggaaatattttgcccacgatatccgcgttatccgtctgccgcgccacggcgcgtcctgtcctatcggtatgggcgtctcctgctccgccgaccgcaacatcaaagctaaaatcaaccgcgacggcatctggatcgaaaaactggagagcaacccggggaaatatatccctgaacacctgcgccaacagggtgaaggcaatgtggttagcatcaacctgaatcagtcgatgagcgagatcctgacgcagctgtcggcgcacccggtctcaacgcgtctgagccttaacggcacgattatcgtggcccgcgacattgcccacgctaagctgaaagagcttatcgataacggcgaagcgctgccgcagtacgtgaaagatcacccgatctactacgccggcccggcaaaaacacccgccggttacgcctccggatccctcggcccgaccaccgcaggacgaatggattcctacgtcgatctgctgcaatcgcatggcgccagcatggtgatgctggccaaaggtaaccgcagccagcaggtgaccgacacctgccataaacatggcggtttctacctcggcagcattggcggcccggcggcagtactcgcccagcagagtattaagagtctcgagtgcgtggcttatccggagctgggaatggaagctatctggaaaatcgaagtggaagatttcccggcctttatcctcgttgatgataaaggtaacgacttcttccagcagatccaaaatcagcagtgcgccggttgtaaacaacacggctaattccctccacgcccggcggctcatcgtcgggcgtattctccccctttattcttgaattcacctgacgctgaactatgctcaatccagcagccgcacagagtttgaccggctgaaaaataacaataattcctctttctggtgtcgcatatgaacaggatccaggcgttgttaacggcgtgttttctgctatggttggccttcccgctttccgcggcagaacctcgtcagcagcccaccgctcgcgagcaggcgcgaaccgtcgctattttccatcaaccgatcgtcatgctacaggctacattcggccagaccacgccggaagaacgggttctgcgcatccgcaatacgctacgcgccttcaccgaagccgatatcagccagccgctgcaggtggtgccagtcacccgctacaaccagccggggcggctatttctgatgaatggcaaacctatcatgttgctaagccaggctgacctcgatgaaggcgacgatctgacgttggatcaggcggcgcagcgcgttcttgcccgtatggaagcgcagcgaacgtcgctgcgtgaacagtacaatacccgctatctgctgttggcagcgctgaaatccgccgccggcgcgttgctcctcgctctggtttgctatctcgctttccgttcgtggcggcgagtacggcgctttttccacctgcggatcctcgaaaaacgcagcatgatcccgcataactggcggcgttttctcggcaacattgaaagccggttatacgcgctgctggtcatactgcttggggtactggcgggttatgtctggctgagttgggtatttagcctgtttccgtggaccagggtatggggagaatcgctcggtgagtggtcggtaggcgttattcgcgatatttcgctgtccatcgtttcggcgctgccgggattgatgatcgtactgcttatctttctgattacgtggtttatcatccgcctgctgaaggtggtgttggatcaggtcgccgccgggcgtctgcagatccccggtctgcatccggaaacagtcggcgccacgcgaaagcttatcgccgtggttatctggctctttgcgctctccgccgcctatcctttcttgcctggcgcaaactctctggccttcaaggggattagcgtgttcttcggcctgatgttgacgctgggctcagcgggggtgatgaatcacgccatgagcggcctggtgctgatttatacccgcgcgctgcataaaggcgactggatccgcatcgccgataacgaaggacaggtcagcgagatcggcatgctggcgaccaaaatcctgacccgcgagaactatattgtcaccctgccaaacgcggtggtggtcagtggtaaaatcaccaatctcagcgccagtgacccgcaacagggaatcaacctcaccaccggcgtgaccattggttacgacacgccgtggcgacaggtacaggctatgctggaactggcggcccaccgcgcccagggagtggatcatcaggtggcgccggtggttcgcaaactgggattgctcgactggtatacgtcgtatgaactgcaggtgcggctgttgccggaaacgacgctgccggagggcgcaacgcgctgcacagcagcattatcgatgtatttaacgaatttggcgtgcagattatgtcccccaattttgtcatgcagccgaaaggcgcggtggtggtcgccaaagaggattggtataccgccccggccgtcgcgccgcaggagcgcgacaggtaacgtcatcccacgccaacgcagcgtcatcaggtaatgccggatggcgctgcgcttatccggcctacgatccgtgcagcctgcctttaatttattccccatgctggctgcaactgccggtgttggtggcctcaaaatcgctgagacgttcccggaaggccggggcagcccgcatggatgcgggctgagggccgtgttttgcacggacgctgcctcggcccgacccgaagcctgccgggataagtcgaaggtaccacgaagtggcgattttggcggcctgagcccggggtacagggggcggcggcgactggccgccccctgtgcgctccctgcgccacggaaaacatattgcagaagaattaaccgggagcgcaagatgctctggagcgaaacgggataaacgcttttctcaagctaaaaagttgccaacgataacagtatcaacaaccgcatcgacaacaaatcagcgccgcgaagcggttccccctatgcctgcgcggcgtcgatctcggcaaacacctgctgcgccagatgcagcgtggcgttcgccgccggtaagccgcagtacagcgccgaatgcataatcaactctttcagctcatcacgggtcacgccgttattaaacgcggcgcgcagatgcatcttaagttccgcctcgcggttgagcgcaatcagcatcgcaatagtaatcatgctgcgagtatggtgatcgagccctggacgggtccaggtttctccccaggcgtaacgggtgatgaaatcctggaactcctcattcagcggcgtcagattctgcagagttcggtcgacatgtgcattgcctaataccttacgacgaacatccattccctgctgataacgttgtttatcttccattttgctcccccaacaaaaagccgttcagcgcggcgttaaaggcggctggcgcttcgatattcgacagatgcgacgcgctcagcaccaccacctgggaatcggcaatctgctgatgcaggaagttagcgtcggcgacagtggtgacagggtcactttctccggcaataatcagcatcggaatcgaaatttgcccgacctctccccgcaggtctgccgccgccagcgcttcgcagcaggcggcgtagccttcggcgtcgctatgggtcagttggtggcataacgcctccaccacatccggcgcgcgctggcggaaattatcactaaaccaacgatccgccgcccccgcagcaaccacatccatcccttcctgacgcaccgcgcgggcgcgggaaagccagcccgactgatcgccgatccgcgccgcggtattggctaccgccacggcgtaaaaacgctccggcgcaaagcgcgccagccataatcccgtcagcccacccatcgaaataccacaaaacagtgccttaccgatattaaggtgatcgagcagcgcaatcacatcttcacccaattgcgccagggtcaccttgccgtttttcgtcgttttaccatggccgtgggtgtcataacgcagtacgcgaaaattcgccgtcagcgcatccagctgcggctgccacatggcgcgcgtggtgccaagcgagttcgacagcacgataaccggcgcgccttccggcccgtcgagttgataatcaagattcatgatgttgctcctgataacgcgccaacacctggcgcacaaagcgttcggcgctacctgtagccgttgccggatccagtagcgcgtttaaacgttcgcgggagagatactgactgaccagcgggtcggccgccagcagatcgacaagcaagccattgcgatccaacgcctgacgacatagcgcttctacacgatgatgcgcctcggctttgccaataaactccgccagcgccagggtcactgcttccgccataatcagcccgtgagtgatatcaaggtcggcacgcatcttatgcacgaaaacctgcatctcgcgcaccagcatgtcagtttgcgccagcgccccgcccaccagcataatcagctccggtagcgtttcccattccgcctgccagccgccgagcgcgcgctcatgctgttggatttgaccggcataaagggtggcgaccagccccggcgtgcgctgcgccgcggttagaatcgccgcgcaggagaccgggttacgtttgtgcggcatggtcgaggagcccccgcgcccttccgccagcggctcgccgacttccgcaacctcggtttgcatcagcagcgaaaaatcattggcgaattttcccagggtgccgcaaacgccggcgaaccaggcgccgacttcgaggaaacggtcgcgctggctatgccatggcgtatccggcaactgcagatcgagggtttgcgccaacgcctgcgccacctgcggcgcctgctgtttcagtgaatcaagcgtgcccgccgcgccgccaaattgcagcgccagcagccgtggacgcatctcaatcaaccgctgctgccagcgcagcagcgcatccagcgtccccgccagtttaagaccaaacgtgaccggtagcgcatgctgcatccaggtgcgccccggcatcaccgtttgttgatagcgctgcgcctgttcggcgaacgcgtcaatcacgctttgtagcaggctatccgtcgccgccagcgcgccgcgcagttgcagaacaaacccggtatcgatagcgtcctgactggtagcgccccaatggacatagcgcgcggcgtccggatcttgcgctttcacccgcgcggtcagctgtttgaccagcggaatagccagattgccggcgctggccgccgactgtcccagcgcgtcgaaatcaataagcgcatgccggcaggcgttgactatcggcgagactgccgccttcggcaccagcccgcactcggcctgcgcctgcgccagcgcggcttcgaaatccagcatgccctgtacccgctgcgcatcgctaaaccagtcggttagcggactgctgcgcaacatgggggtcaacaaactcatcgctactccttaaacgcgttcaataatcagcgcaatcccctgacccacgccgatacacatggtgcacagcgcatagcggccgccggtacgcttcagctgatatgcggcggtcatcgccagacgcccgccggaagcccccaacggatggcccagcgcgatcgccccgccgttggggttaacgtgggcagcatcatccggcaggcctaaatcacgggtaaccgccagcgcctgcgcggcaaaagcctcattcagttcgatgacatccatctgcgccagcgtcagcccggtttgcgccagcaccttacgcaccgccggcgccgggccgaagcccataatccgaggggccacacccgccgtcgccacgccgacaacccgcgccagcggctgtaaatcattcgccgacatcgcctgttcactggccaacaacagcgcacaggcgccgtcgttgacgccggaggcgttaccggcggtaacgctgccgtcggcgcggaccacgccgcgcagtttagccagcgcctccagcgaggtgctgcgcggatgttcatcgcggctgaaacgcagcggctcacctttgcgttgcggcaccaatacggcgatcagttcatcggcgaaccgccccgcttcctgcgccgccgcggtacgtaactgactgcgtagcgcaaaagcgtcctggtcggcgcgagaaatggcgaactcatcggcgacgttttccgcggtttccggcatcgagtgcacgccgtacagcgctttcatctgcgggttaataaatcgccagccgatggtggtatcttccatctgcatcgagcggctaaaggcgctctcggctttccccatcacaaacggcgcacgcgacatactctccaccccgccggcgatcatcagttgagtttcgccgcttttaatcgcccgcgccgcgacgccgatcgcatcgagactggaaccacacaggcggttaatcgtactgccgggaacgctctgcggcagcccggccagcaacagcgccatacgcgccacgttacggttatcttctccggcctggttggcgcagccgtagatcacatcgtcgatcagcgccggatcgagtcccgggttacgctccagcagcgctttcagcggcagcgccgccagatcgtcggcgcgcatactcgataatgcgccgccaaaacggccaaacggcgtacgcaccgcatcacagataaatgcctgattcatcataggttccttacgcgctttccgccagttgttcaaaagtcagcgccaccggagtgatgcgctgtagctcttcaaatgagaggccattaaagatttcgcgcaccaccgggccgcggtcggtaatatcgatgaccgccagatcggtatagatacggctgacgcagccgacgccggtcagcgggtagctgcactgctcgaccagtttgcattcgccatcgcgggtcagatggtccatcatcacaaacacctggcgggcgccgatagccaaatccatcgcccctccaaccgccgggatcgaatccggcgcgccggtgctccagttagcgagatcgccgctggcggaaacctgataggcacccagcacgcagatatccagatgtccgccgcgcatcatggcgaaggagtcgccatgatggaaataacagccgccctgcagcagggtgacatactctttacctgcgttgatcagttccggatcctcctcgccgggctgcggctttggccccattcccagtagcccgttttcactgtgcaggaacacctctttatcggcaggtagatagttggcgatgcgggtcggcagaccgataccaaggttgacgtaagcgccttccggaatatcgcgggcgacgcgctgggccatttcgtcacgagtcagtttttgcatcttcggctcctcaggcgctttgcgcggcggacagattttccagcgagaatacgcgctggacgaaaatccccggtgtgatgatgttttccgggtcgagttcgccaagggcgaccagttgcgagacttcaacaatggtggttttggcggcggtcgccatgatggggccaaagttgcgcgccgctttgcggtagatcagattgccccagcggtcgccctggtgggccttgatcaaggcgaagtcagctttaatgggatactcaagcacataatggcggccgtcgatttcccgggtttctttgccttccgccagcggcgtgccgtagccggttggggtaaagaccgcgccgagacctgcgccagcggcctgaatccgcgccgccagattgccctgcggcaccagttccagctcaaccttaccgcggcgatagaggtcatcaaaaatttgtgaatccacctggcgcgggaatgagcagatcattttgcgcacccgtccggctttgagcagcgccgccaaccccacttcaccattacccgcgttgttattaataatggttaggtcgcgggcgccctgttcaatcagagcatcaatcaggtacgtcggctgcccggcgggaccaaacccgccaatcatgatggtcgcgccgtcgtggatcccggcaatggcctcactcagcgtcgacacgcttttatcaatcatcaggtcgctccttaacgtgcggtaatcgcacttatatgcgttgttcgcacaaaatgtgacccgcttaacgatgctggtcaagggcgataatcgaaatatggtgcgataatcgaacatcgtatatctttagcgaaagaatgtgatcgatggcaaatacggagaacaaaatggacaagcatccagatgatgtagtggcgggcgacggcgatccgtttaagggcgacccgaactttatggcgtcgctggcgcgcgggctggaagtgattcaggcttttactccgcagcgcccggtactgtcgatttcgcaaatcagccagaaaaccggcattcctcgcgcggcggtacggcgttgcctgtacacccttagcaaattgggctttgtttacgccgaagacggtaagaatttccagttgcgtccacggatacttgcccttggtcacgcctggctggcctcaacgccgctggcgcgctcggcgcaaccggtgcttaagcatctgagcgaaatgctcaatgaatcctgctcaatcgccaccctggatggcgacgatattctgtatatcgcccgcgcttccagttcgcggatcatgactatcgatcttgatatcggcagccgcctaccggcgtgggcaacctccatggggcgtgtgctattaagccatcagccggaagaacggctaaacgacatgctgagccgggtgacgatgattcgctacaccccgcagacggtagattcggtaaataagctgcgcgcagagctaaaacgcgtgtatcagcagggatatgcgttaaacgatcaggaactggaaatggggctgcgttcgctggcggtaccgctatataacccgcagggacaggtggaagcggcgctgaacgtcggggttcacgcgggccagatgtcgacccgcgaaatgctggatcgggtgctgccggaattacaaaaagccgcccgcgagctaacgctgctgctgcgctagcggctgcgtttagcgtgcagctcccagttctcctgcttagcctgttcggatttacgcagcgccacgtaacaagcgccgctgccgccgtggtgcggtagcgcggcgcaaaacgcctgtacctcgggcaactctggcagccagcgcgccaggtagctgcgaataatattggcgtgggcctggtcatcacggcctttgccgtggatgataagtaaattacgcagccctctttttgcgcctgtatcacgaaggcgaacagcatttgccggcactgttcgaccggttggcgcaacagcgacaggcttgcctgctggctgtattttccacgccgcagcttgtccagcactccgctttgcagcccttcccgtttgaactccagcggcacggcgagcggtacgatatcgaggtagccggtggtcagaaaattatcgagctgtagggtatcgatacgctgcggggcgcgcacgttgcgctcacggtgccagtgtacgtcattgttgcgtttcagaggctggacatcctccatggcgtcaagaaacagggatttgtcgtcaaggttcatggtctctcctccagcggctatcgcctgctactatatccgcctcgcgcctccccctcaacgcgtttagccgccactgccggtaaatacctcaacgcaggattttaaggaaacaattgacggctttgacgacgaaacaaggtgattaacgaagccgttaacggcgtctgtcgcgtgtcgcgccgctggatcaggtagtaggttgccctgggcaacgtttcacgtatcgggatcatcaccagtttatccgccatcatcggatcgtttccgagttcgaccggcagaatgctgaggaaatcgctcttcaccaccagactgatgcacgaagagaaggtttcacacacgatatcgaccttgggcgccagcccggcctggttaaacatctcctgcagttgtttaaagtagctgccgcgcggcgttggcatcgtccagtggtgatcgagcaattcagcgagagaagtggcgcgcgccgccggatgtccggcgcgggcgaataccgcgaacggtttctcgaacagtttttcaaagctgaattcatgatcgtacgggccgggatagtaggtgttgatagtgaaatcaagctcaccctgacgcagttcattaatcatcgccaggagttgcccttccatgatccgcaccttcaccagcggatgctgctgatgaaagcggcagatcaccgatggcatcagcgagcgcgcgacgctggcgccgaggccgatattaatctgcccggcctgctcgccctgacgctgtagcagttcatcctgcgccgcccgcagctcttcaaggatcagactcgcatgttggtaaaaactttcgccgttttccgtcagcgccacccctggctgcggcggacaaacagttgggcggaaagcccttcttccagctctttaatcgctttggtcaacgcgggctgcgagatcgccagcgcccggctggcgccgcgaatactcccctcgcgagcgacctcaacgaaggcgcgaatttgatgaaatttaatctgaaatgacatgttttaggtgataaccattgtttatcagacagaagaaaatgacatctactgtaatccatcatgctgtggcaggttaagggtgagattgccttaaaggcgtatgtgataagcaaaagctatcgcttcgtgaacgccgtcacacttttttattatgacaggaagggttatgccgcaacttcatgaattggtaagccaattggcgccggaaatgacgcaatggcgtcgtgattttcacctacacgcggagtccggctggctggaatttcgtaccgccagcaaggttgccgagatcttagacggactcggttatcaactggcgctggggcgcgacgttattgatgccgacagccgaatggggctgccagacgacgccaccctggcacaggcattccagcgcgcccgcgaacagggagcgccggaacgttggctaacggcttttgaaggcggattcgccggcgtagtcgccaccctggacaccggccgccccggcccgacgcttgcgtttcgcgtcgatatggacgcgctcgatcttaacgaacaacacgacgattgccatcgcccgcatcgcgcgggtttcgcctcctgcaacgccggaatgatgcacgcctgcggccatgacggccataccgccattgggctgggtttagcgcatgtgctacagcagtatgccgatcggctcaacgggatcatcaagctgattttccagcctgccgaagaaggcactcgcggcgcacgcgcgatggtggcagcgggaattctcgataacgtggattatttcaccgccattcatatcggcaccggcgtccccaacggtaccgtggtctgcggtggtgacaactttatggcgaccaccaaattcgacgtgcaattcgagggcgtcgccgctcacgccggcggcaaaccggaagatggccgtaacgcgctactggccgccgcgcaggccgccatcgcactgcacgccatcgcgccgcacagcgccggcgcctcgcgggttaacgtcggtgttatgcaggccggcaccggccgcaacgtggtcccttcttccgcgctgataaaagtggaaacccgcggcgagacggaagctatcaaccagtatgtgtttgagcgggcgcaaaatgtgattgccggcgccgcagcgatgtatgaagcccgctatgaacttcggctcatgggcgcggcaacctccagcgcaccttctccggcgtgggtgcaatatctgcgtgagcaggcagcacaggtgccgggggtagtagaagcagtggatcatattgccgcgccggcgggatccgaagatgccaccttgatgatggcgcgggtacaggatcgcggcgggctggcttcatacatgattttcggtactgaactgagcgccggacatcacaatgagaaatttgatttcgacgaaggggtcatgaccatcgcggtcgagacgctggcgcgcatcgcgctcaactttccctggcagcgaggtgtgtgatggaaaagatctatcaatttgtcgatgacatcattgagtcgcagcgcgacgatttttgcgctatagccgatgatatctgggatcatccggaaacccgcttccaggaattctggtccgcggcgcggttggccgactcgctggaagcggaagattttcagctaacccgtaacgctggcggcatacccaatgcgtttatcgccagttttggcgagggtaaaccggtcatcgccctgctcggcgagtttgatgcgctggcaggactcagccaacaggcccacagtgctgaagcgacatccgcgacgccgggggagaatggccacggctgtgggcataatctcctcggcaccgcagcgttcgccgctgctctcgccgcgaaacagtggctgcagaagcatggcggctcgggcaccctgcgcttttatggctgcccgggcgaagaaggcggctcgggtaaaacctttatggtgcgcgagggactattcgatgatatcgacgccgccctcacctggcatccagaagcctgggccgggatgttcagcaccagcacgctggccaatattcaggcggcgtggcgctttagcggcaccgccgcccacgcggcaaactcaccgcatctggggcgtagcgcgttggacgccgtcacgctgatgaccaccggcagtaacttcctcaatgagcatattatcgaaaaagcgcgtgtgcactacgccattaccgataccggcggcgtgtcgcccaacgtggtgcaggcacaggctgaagtgctgtatttgattcgcgctccggaaatggccgacgtgcagcaaatctttgcccgtattgagaaaatagcccagggcgctgcgctgatgaccgaaaccagcgtcagctgccgctttgaaaaagcctgttccagctatctccctaatcgcacgctggaagcagcaatgtatcaggccgtatgtcattacggtacgccgcaatggagtgaccaggagcgcgctttcgcagcggatattcgcgccacgctcggcgtgaacgatatacaaaacagcctgaagaatattgccggcaccagcggtgaagaaggaaaagcgtttgcccgccgccatcacgacacggtgctgatcgatgaggtcgcgccgtgggcggcgacggaaaacgtgctggccggctctaccgacgtcggcgacgtgagctggaaagcgccggtggcccagtgttttagcccctgcttcgccatcggtacgccgctgcacagctggcaactggtaagccagggaaaaacctccatcgcccataaagggatgctgctggcaggtaaggtattgggagcaacggcaattcgtttgttcagcgacaggccgttgctcgaagcaagccagcaggaactggctcaggtactggcggtaagcccataccagtgcccgatcccgcatgacgtcgtaccatcaattttaaaataagaaaaattagcctctgggataacgtacagcgtgatggcaatcgccaataaaaataacagctgacaacccctgaggcatgccgcaaacaacacaacaacgacaactgaggaacgcccatgagtatgtcatccataccgtcgcattccccaccggtaagctgtatggctgggttgagaaaataggtaataaggttccgcatccatttttgctgtttatctatctgatagtggcgctgatggccgctaccgctatcttgtcgtcgctaaacgtcggcgtacagaaccccaccgacggttcgcgagtggtggtaaagaatctgctcagcgttgaggggctgcactggtttctgccgaacgtgattaaaaactttagcggcttcgcgccgctgggggcgattctggcgctggtgctcggcgccggttttgccgaacgcgtcggcctgctgccgtcgctgatggtcaagatgtcatcgcacgttagcgcgcgttacgccagttatatggtgctatttatcgccttcttcagccacatctcttccgacgcggcgctggtcattatgccgccgctaggggcgttgatgtttctcgccgtcggtcgtcatccagtggcggggttgctggcggcgatcgccggcgttggctgcggattcacggcaaatttactcattgtcaccaccgacgtattgctctccggtatcagtaccgaagcggcgaaaacgctcgatgcctcgctgcatgttagcgtcatcgacaactggtacttcatggctacctcagtcatcgtacttactctggtcggcggattgattaccgataaactggtcgagccgcggttaggaaagtggcagggtaaaagcgatgaaacgctgcagacgctgacggcggaacagcgcttcgggctgcgcattgccggtattgcggcgctgttgtttgtggcggttatcgcgctgatggtggtgccggacaacggcattctgcgcgatcccatcaagcataccgtgatgccctcgccctttattaaaggcattgtgccgctgattatcttttttttctttgtcgtatctttagcttacggcatcgccaccggcaaaattcgccgtcaggctgacctgccgcagttaatgatcgagccgatgaaggagatggccggatttatcgtgatggtcttcccgctggcccagtttgtcgccatgtttaactggagcaacatggggaaattcatggccgtaggtctgaccgatgtgctggagagcgccgggatgaatggggtaccggcgtttgtcggcctggcgctactgtcggcgtttttgtgtatgtttatcgccagcggttcggctatctggtcgattctggcgcccatttttgtaccaatgtttatgctgctgggctttcacccggcgtttgcgcagatcctgttccgaatcgctgactcttccgtgctgccgctcgcgccggtatcgccgtttgtgccgctgtttctcggctttttacagcgctaccggcccgatgccaaactgggcacctactattcgctggtattaccctacccactcattttcttagccgtctggctactgctgctggtaggctggtatcttgtcggactgccgataggccccggcatctatccgcgtttaccataacgcagcgacaggccagggagggcctgcgtgagttaacgaattgtggtacggttcaggaatgttttacacagactttcaatggccaaccacagcaaattgatagctaacccactgataatcaacacaacaactcccgttaatatgtattgcatatcgccacctttctgttagttaaaaaaaaccagcgccaaagcgctggaaaaataattgactcaaggaatgcctgtatatttatctgcggcgccgggtgcctcccggtgaattagccagttcgcgctaactcgcgtgcgtatgacaaactgcatagagatttgaactgaacgctcctccgcacaggggaattcgccgccggacaaaggtagcaaaatgccctttctgccgcgcctgctagttaatgcaaaaataaacattgctccccctccctttattccggcaatttgcgattgggcaatggaatgacagaatttaaatgactgcgattcgtatttataaattaatagtacagcctttcattatttgctgacctttcggaggtatagttggcagagcgcacgtcatgatatggtgtgcccttgccgaaataacctcgtagaaggaagaccgatgctgacgctactgcaagataaaatcgataccccgctggggccgttgtgggtcatttgcgatgaacaatttaacctgcgcgccgtggagtgggatcagcacagtgaccgtatggagcaactgctcgacatccactaccgtcatgagggttatgaacgcatcgatgcacgcgatccgggcggactgagcgcgaagctgcagcaatacttcgacggcgatctcgcaattatcgataccctgccgaccgcaaccggcggtacgccgtttcaacgtcaggtctggcaagcgctgcgcacgattcctgcgggcaagtcatgcactacggtcagttagccgaggtcctcggccgtccaggcgccgctcgcgcggtcggcgcggcaaacggttccaatccggtcagcattgtagttccctgccatcgggtgattggccgtaacggcaccatgaccggctacgccgggggcgtacaacgcaaagagtggttattgcgccatgaaggctatttgctgctttaacagataatgccttttttggaaattacaggtaactttacaataattaatcgcttaataaatttatttttatcaaagagatagggtgaaaggtatatttccccttctaatattgcgtctttccgggtttcgagacttacttgctcctcaaaaagatgttaaaattgaccaatatcaattaaagcttgagcagacatatgatcccggaaaagcgaattatacgacgcattcagtctggtggttgtgcaatccattgtcaggattgcagcattagccagctctgcatcccctttactttgaacgaacatgagctggatcagcttgataatatcatcgagcgtaagaagcctattcagaaagggcaaaccctgttcaaagcgggagatgagctgaagtcgctgtatgctatccgttcagggaccatcaaaagctacaccatcaccgaacaaggcgacgagcagattaccggcttccatctggcgggtgatttggtcggttttgacgccattggtaccgccctgcacccaagctttgcgcaggcgctggaaacctcaatggtatgcgaaattccgttcgaaacgctggatgacctttccggtaaaatgccaaacctgcgtcagcagatgatgcgcctgatgagtggcgagatcaaaggcgatcaggacatgatcctgctgctttccaaaaagaacgcagaagaacggctggcggcctttatctacaacctgtcccgccgtttcgcgcagcgcggcttctcaccgcgtgagttccgcctgaccatgacgcgtggcgacatcggcaactatctgggcctgacggtagaaaccatcagccgcctgctcggtcgtttccagaaaagcggcatgctggcggtgaaagggaaatatatcaccatcgaaaacagcgatctgctggcgcaactggcaggccaggcgcgcaacgtcgcctgatttatctccgctatactttcttctaccttgtgccggatcgacatttttttctaatttgttgatctggccagggtcatcccctgtttcaattcatccatataggttatctttttaatgactgactgtagctacagctgtaaggagaccctgtatggcgaagtatcagaacatgctggtagtaatcgaccctaaccaggacgaccagcctgcattacggcgcgcggtgtatctgcaccaacggattggtggacgcatcaaagcctttttgccgatctatgatttttcctacgaaatgaccaccctgctgtcgcccgacgagcggacggcgatgcgccagggcgtgattagccaacgcagtgcctggatccgtgaacaggccaagttttacattgaatccggggtgccaatcgatatcaaagtggtgtggcacaaccgcccctttgaagccatcattcaggaaatcatcagcgataaacacgacctgctgctgaaaatggcccatcagcacgacaaactcgaagccgtcatcttcaccccgaccgactggcacctgctgcgcaaatgtccatgcccggtatggatggttaaagatcagccgtggccggaaggcggtaaagcgctggtggcggttaatctggccagtgaagagaactatcacaacgccctcaatgaaaaactggtgcgggagaccatcgccctcgccgatcaggttaaccataccgaagtacatctggttggcgcctatccggtgacgcctatcaacatcgccattgaattacctgattttgacccgagcatctataacgatgcgattcgcggccagcatctgctggcaatgaaagcgctgcgccagaaattcagcatcgatgaaaaccgcacccacgtagagaaagggctgccggaagaggttatccctgatttagctgaacacctacaggccgggattgtggtactgggcaccgttggccgcaccggtatttctgccgcgtttctcggcaataccgcggaacaggttatcgaccacctgcgctgcgacctgctggtactgaaaccggaagcttatcaaaccccggttgaactggacgatgaagacgacgactaacggcgtctcatcaggtttgaaattatatctaacatccccgcccgtcggggatttttttgtcggcccgctaaaaaagaaaaagggccatacggccccggatatcaacgctaatttaacaagcttacagaatgcgttagtggatacctaaacgccaggccaggtcgatctcttctttcagttccatcgacgaaagcgacatcagatcggcaaactcgagctcgaggagtttgagcttcttcaggtactgcgcgggggtcataacagcggtatcgcggcgcaggtactcgatggccatctgcgtgggggttaactcggtatccataatatcctcagtgtggtgaaaaaacaggcatagtataacacccatcgccgttcactttatgagcaaatcatggtttcgctgtctatataaaaaagccgtctcaacagagacggcttagagcgttgcgctattacagcgctttcagaatggcatcaacgctggctttagcgtcgccaaacagcatgtgggtgttctctttgaagaacagcgggttctgcacgcctgcatagccggtgttcatcgaccgtttaaagaccaccacgttttgcgccttccacacttccagcaccggcataccggcgatcgggctcttcggatcgtcctgcgccgccgggttcaccgtgtcgttcgcgccaatcaccagtacggtatcggtatcggcgaaatcatcgttaatttcatccatttccagcaccacatcgtacggaaccttcgcttccgccagcagcacgttcatgtgccccggcagtcgtccggcgaccgggtggataccgaagcgcaccttgataccgcgcgcacgcagcttctcggtgatttccgccaccggatactgcgcctgtgccaccgccatcccgtagcccggcgtgatgatcacggaatgcgagtttttcagcatttccgccgtctcttcagcgctgatttcacgatgctcgccaacttcttcatcgccgctggaactgccgccatcggtgccgaaaccgccggcaataacgctgataaatgaacggttcatcgccttacacataatgtaggagaggatggcaccggaagaaccgaccaacgcaccggtcacgatcagcaggtcgttgctgagcatgaagcccgccgccgccgccgcccaaccggagtacgagttcagcatcgaaaccaccaccggcatatccgcgccgccgatagaagccaccaggtgccagccgaacgccagcgcgataatggtcatcaccagcaggcacaaaacctgcgtcccggtgctgtcggtacgcacgaaggccaccagcagcaggaaggagatgactaacgccgccaggttcagcttgtgacgattcggcagcatcagcggttttgacgaaattttgccgcgcagcttaccaaaagcaacgatcgagccggtgaaggtcacggcgccgataaagatgccgagaaacacttcggtcaggtgaatgttcgccagcacctgatcgaggcccggtccgtgatcgagataactgttgaagccaaccagcaccgccgccagaccaacgaagctatgcagcaccgccaccagctccggcatctcggtcatttcgactttcttcgccaggcgaataccgatcgcgccgccgataaccatcgccacgatgatccagccgacgttaccgctgtccggcccgaagatggtggcaatcagcgcaatcgccatcccggcgatgccgtacaggttcccctgcttcgacgtttcgtgctttgacagccccgcaaggctaaagataaacagaatagcggcaacaatgtatgcagctgtaactaatcctccagacatgtgctaccccttagtttttgcggaacattttcagcatgcgctgagtaacggtgaaaccaccaaaaatattaatgctggcgatcaacaccgcgataaagcttaagaagctgacccagccgccgtgccctatctgcagcaatgccccaacgacaataatccctgaaatggcgttggttaccgacatgagcggcgtgtgcagcgcgtgcgacacgttccacaccacgtagtagccgactacgcaggagagcgcaaagacggtaaagtggccaagaaactctttaggcgcgacgttcgccagccagccaaagaggataatcgccaacgccatcagcgcgtatttacgccacggcgaacctggtttagcctcttcttttggcgcttcgacggttttcgccgccgcctgtggctgagcggaaacctgaatcggtggcgccggccaggtaatttcgccctcgcggaccaccgtgacgccgcgcaccaccacatcgtcgaaatcgatggtgatattgccgtctttttccttgcacagcagcttcagtaggttcaccaggttggtgccgtagagctgagaagattgcgtcggcagacgacccggcaggtcggtatagccgataattttcacgccgttggcggtggtcacgacttcgcccggcacggtgtattcacagttgccgccgttttgcgacgccagatcgactaccacgctgcctgacttcatggcgtcaaccatttcgcgggtaatcagcttcggcgccggtttacccgggatcaaagcggtggtgacgatgatatcaacatctttcgcctgcgcggcgaatagcgccatctcggctttaataaaagcttcagacatgactttggcataaccgtcgccgctgcccgcttcttctttaaaatccagttcaaggaactcggcgcccatactctgcacctgctctttcacttccggacgggtatcgaaggcacggacgatggcgccgaggctgttcgccgcgccaatcgccgcaagacctgcgacgcctgcgccgatcaccatcaccttcgccggcggcactttacccgcagcggtgatctggccggtgaagaagcggccaaactcgtgagccgcttcgacaatcgcgcgataaccggcgatgttggccatcgaactcagcgcatctaacgactgggcgcgggaaatacgcggtaccgagtccatcgccatcacgttgataccgcgagcggccagcttttccatgagatccggattctgcgctggccagatgaaactcaccaatgtggtgcctggattgagcctggcaatttccacatcgttcggcgcgttaaccttgaggataacgtcggagtgccagacgttatccgagctgacgatttccgcgcccgcctgttcgaaggcttcatcgtcgaagctcgccagtttcccggccccgctctcgaccgccacgctaaacccaagcttaagcaactgctcgaccgtcttcggcgtcgcagcggcccgggtttcctgagctaagctctcttttggtatcccaattcgcatagttttcccttccatcggtttttgatgatggtttatttttttcacaaatgcgccagcggcggcgcaaaaacgccgcacaggtattcatctggaaaatgaaacagtaacaaactttttataacctactgaaaataccgattgtgatctacatcgttaaaacagaatttttgattttattgagaaaaattagtcctgactgcgtcaggcagcaatatttgccttaattttatgccagaacctgataattcgcttacctgagggattaattcgccatttattaccgtcagtatcattgcattaacattacgttaacttataaaagtgatattgattatcgattttgctgttcaaggggctgttttttcaacatatcagtatttgttatatttttgtaatgaacgattcgggcgggaagtgaaaaatgacgcagacagttacgttgtttaaatgcaataatcacctgttttcagtcaacaacaataccagtacatggtttgcgcaaggcaaaggattatttttatgaagcttaagaacacactcctggcgtctgctcttctggctaccaccgcgttgtctgcccatgcagcgaccgagctgactccggagcaagcggcagcgctgaagccctatgaccgcgtcgtcgtcactggtcgttttaacgcgattggcgatgccgtacaggcggtttcccgcaaggcggataaagatggcgcagcttccttttatgttgtcgacacctcagatttcggcaacggcggcaactggcgcgtaacggcggatttttataaagaaaacgccccgcaggcggataccccgaaaaaccgtatcattaacggcgtgatggaactgccgaaagatcaggccgtcgcgctgatgccttatgacaccgtgaccgtgcagggcttctaccgtagccagccggaagtcaacgacgccatcgccaaagcggcaaaagccaaaggcgcgtatgccttcttcatcgtccgtcaggttgacgccaatcagggcggcaaccagcgcatcaccgcttatatttataaaaaggatgcgcagaagcgcgtactgcagagccctgatgcgattccggcagactccgaagccggtcgcgccgctctggctaaaggtggcgaagcggctaaaaacgtcgaaattccaggtgtggcctcctctgccgccgtcggcgccggtaccggcgtaggcctgttctacgaaacccaatcgtcgaaaggcggacgttacactgtcaccctgccgaatggtactaaagtcgaagaggtgaacaaaatcaccgccgcgcagatggtgccgtttgatagcatcaaattcaccggtaactacggcaatatgacggaaatctcctaccagactgcgaaacgcgcggcgaagaaaggggcaaaatactaccacatcacccgccagtggcaggaacgtggtggtaatatcaccatcagcgccgacctgtataagtaatcggtttcagctgctcaaaaaggcgacatcacgtcgcctttttacattttttcgcccgccgccattgcatgcgttcaagacactccgtaaaatcccgcgccttagcgtaatcctccatttttatgcgatttcgccaaataaatattcttgattcactgttgccacctcgggaatacaatggaaaagaaactgggccttagcgccctgaccgcactggtactcagctccatgctgggcgcgggtgttttcagtttgccgcaaaacatggctgccgttgccagcccatccgctctgcttatcggctgggccatcaccggcgttgggattttattcctcgctttcgccatgctattgctgacccgaatccgaccggaactggacggcggaatctttacctatgcccgcgaaggttttggcgaactgatcggtttctgttccgcctggggttactggctgtgcgcggtgattgccaacgtctcctacctggttatcgtcttctccgccctcagtttcttcaccgatacgccggagatgcgtatttttggtgacggtaacacctggcaggcgatcgtcggcgcgtcagtgctgctatgggtggtgcattttctggtgctgcgtggggtacagaccgcggcaggcattaacctggtggcgacgctggctaaactgttgccgctcggcgcatttgtggcgctggccgctattgcgttccggctcgatactttccgcctcgacttcagcggcatcgctctcggcgtaccggtatgggaacaggtgaaaaacaccatgctgatcaccctgtgggtatttatcggcgtggagggcgcggtagtagtctctgctcgcgcgcgccacaagcgcgacgttggccgcgcaacgctgctggcggtggtctcggcgctggcggtttatctgctggtcaccctgctgtcgctgggcgttgtcgcccgcccggaactggctgaaatgcgcaacccgtcgatggcaggcctgatggtcaaaatgatggggtcatggggcgaagtagtgatcgccgcgggattaattatctccgtctgcggcgcctatttaagctggaccattatggccgccgaagtgccgtatctggcggcgacgcataaagcgttcccgcgcctgttcgccaaaaccaataagaataacgcgccctcttcctcgctgtggttgaccaacatcagcgtacagatttgtctggtcctgatttggcttaccggatctgactacggtaccctgctaaccatcgcctcagaaatgattctggtgccctatttcctcgtcggcgctttcctgcttaagattgccgtgcgtcctttacataaagccgtgggtgtcggcgcgtgcgtttatggcttatggttattgtatgcgtccggtcctgtgcatttgctattgtcggtggtactttacgctccgggtcttctggttttcctgtacgcccgccgtactcaccagcacgatcgcatgctcaaacgccgtgaaatggcattaattggttttttgctggttgccgccgttccggcaacgtggatgctggtggggtaagcggttgccctaccgctgaacttgaaaggagatacccatggctgaaccacagcctcgtccggtcctgatcacgggagcaggccgccgtatcggcctcgctctggcacaccattttttaaaccagcagcaaccggtgatcgtcagctatcgccagcattatccctcgattgacaccctgcgcgaagccggcgcggtgtgtctgcaggccgatttcagcagcgacgacggtattcttaccttcgcggaagcggtgaaggcgcagaccagcggcctgcgcgcgattattcataacgccagtgattggatggcggaaaaacccggtgtgccgttatccacggtgatatcgcagatgatgcaaattcacgtccacgcgccctatctgcttaaccacgcgctggagagcctgctgcgcggttttggtcacgccgccagcgatattattcacattaccgactacgtggtggaacgcggcagcgataagcatatcgcctatgccgccagtaaagcggcgcttgataatatgacccgctctttcgcccgtaagctggctccggaagtgaaggttaacgccattgcgccatcgctaattatgtttaacgagcatgatgacgctgaatatcgtagacaggcgttggataaatcgctgatgaaaatcgcgccgggtgaaaaagagattatcgacctcatcgattatctgttcaccagttgctacgtgaccggccgctctttcgctgtcgacggcggccgaccgctgcgctagtggaagcggctccaacctaggatgagcagccaggcagccagactccagcagatcaccgcgcctgccagcgcgtaaggcaggcgcattacgccggtgaagtaccataacgaaagtaagtagataaaatacgggatgattgaccacatgccgaagacgatagtcgtgcgcagcgcttcaatgccccgctcgctggccacgatgtaatgggcaataagcgcgaaggtcggaaataacggaattaaaccggcaatatagtaatttttggtttttgacagtacgcctatcagtaccaccaccagcgctcccagcagcgctttaatcaacagccccattttatgccttaacatttgaacaacaatttccaccagcataacggaagaacatttgtttatgaaagattaatggcaggcaatttgcgggcggtgtatgttagctttttaatttatacgcgtaagatatgaataagatcgtttttgttgaggatgagcccgaagttggcgcgcttatcgccgcctatctgggaaaacatgatatggacgtggttgttgagccgcgcggcgaccgggccgaagaagtgattgctcgtgaacaacccgatctggtactgctggatatcatgctgcctggcaaagacgggatgacgctgtgccgcgacctgcgcagccagtggcagggtcctatcgtgttactgacctcgctcgatagcgatatgaaccatattctgtcgctggagatgggcgccagtgattatatcctcaaaaccactccacctgcggtgctgctggcccgcttacgtttgcatctgcgccagcacgtggcttcgccgtcgatacccgctccagcgaccctgacgccgcataaagcccttgtttttggttcactgtcgatcgacccggttaaccgacaggttctgcttggcggcgacaacgttgctttgtccaccgccgatttcgacctgctgtgggagctggcgacccatgccgggcagattatggatcgtgatgcgctgttgaaaaatctccgcggcgtcagctacgacggcatggatcgcagcgtcgatgtcgcaatttcacgcctacgtaaaaagctgctcgacaacgccaccgagccctaccgcatcaagacggtacgcaacaaaggctatttgttcgcccctcacgcctgggataattaatccgcgtcaggaatagaccgacatcgcgccgtgtagtcggtcttgaaattcagcgtatttctctctgaatgccttttcatcgttttcgtcataccagcgtgcgacctgactgctggcaaggaaatgatccagtagttcgccgctcgccagaatccactgcggtaaaccatcgacctgcaggctccaacccaccggatgatagtggatgaaatcattgcgcagctggtgaagtttgcccatcgccaccgtacagtcttcgctgggtgcgaatccgcagatctccctcgtcgcacggtataacgccatgaaagacggcaactgcagcttgtcgatgttggagaaatcgtcgttataaatttgctggaaaatatctcgagtcgacgctttaccgtcggccaggtagacctgaaagtcattgtcctgacacaacgccaacaccatcgcgttctgcaggatgctgtgccacccggtaatcacccacttccactgatagggatcggcgatcgcctgcatatggctcagaaccatatcgaaggtttttaaaatctcaacatcattatccgtatgcaaatacacgggcttagtcatctggcgttctccgtcatttaagggggcgcttaaattaacagagaggctggcgcatggcaggacgggcagttggctgaatagggctatcggccattcagcctggcgcctcagtgagaactttgccgagcgggattcttctcctgtagaatcttttgttgcgagataccccagttaatgaccggtgattattaatgaaaaaactgttcgtgcagttttaccttttgctgttcgtctgcttcctggtcatgaccatgctggtcggcctggtgtataaatttaccgccgagcgcgccggacgccagtcgctggacgatctgatgaaaagctcgctctatctgatgcgcagcgaactgcgcgagatcccgccgcgcgactggagcaacacgttgaaagagttggaccttaatctctctttcgatctgcacattgaaccgttaagcaaattcaagttgtcggaaagctcgatgcagcatctgcgcgcgggcgatatcgtggcgctggacgatcagtacacctttattcaacgcatcccgcgcagccattacgtactatcagtcggcccggtgccctatctctattttttgcatgagatgcgcctgctggacgtcgcgctgatggcgtttatcgctatttcgctggcgttcccggtgtttatctggatgcgacctcactggcaggatatgttgcgtatcgaaaccgccgcgcagcgcttcggcgaaggccatttcagtgagcgcatccatttcgatagcatgtcgagcttcgagcgactcggcgtggcctttaaccagatggccgataatatcaacgccctgatagccagtaaaaaacagcttattgacggtatcgctcatgagctgcgcacgccgctggtgcgcctgcgttatcgcctggagatgagtgaaaatctgaccgaggcggagtcgcaggctctcaaccgcgatatcgggcaactggaagcgctgattgaagagctgctcacctacgcgcgcctcgatcgcccgcagaacgaactcaacctgaccacccctgatttcccggcctggatccgcgcgcacgtcgaggatattcagctggtcaatccgcagcgtgaagtcgcattgcgccagcttacggcaggcgactacggcgcgctggatatgcgtttaatggagcgcgtgctggataacctggtcaataatgccctgcgttacagtcagcaacatattcagattggcctgtcgctggccggttcgcgggcgacgctgcgcgtggaagatgatggcccgggtatcgcccttgaggaacgcgagcgggtattcgagccgtttgtccgcctcgatcccagccgcgatcgcgccaccggcggctgcggcctggggttggctatcgtacacagtattgctcaggcgatggccggtgaagtccgctgcgacgaaagctcgctcggcggcgcggcattcattttcagctggcctatttaccaccagcttcccgcttttacttctgcttagccgaacttgcgcaggcgttacggcctgcgtatagtttatactcaaacagtatgttgtaactaaggcggtaataatggcaagctacgacctcgttgcgcgcttaaatgacacctttcgtgagcttgagcgcgagctacaaaccttcaaagcgtcgctgagccgctgtcgcctgctggcggcgcgggttttcgaattgccggcggtaagcaaagaggcggagcacgcgccgctggataccattcaggtcacgcagcatgttgggcaagacgcgctggagatggcgctcaggcactacagccatctgtttatacagcagcagtcggaaaaccgcagcagcaaggcggcggtacgcctgcctggggcgatttgcctggcggttgatacgcaacggcaggcggagctactggagaaaatcagcgctattaacgcgctgaaagcggcatttgagaaaatagtcaccgtcgattccggattgccggccgccgcgcgtttcgaatgggttcaccgccaccttccaggcctgattaccctcagcgcctatcgtacgctgacgccgttgcgcgatcccagcaccatccgcttcggctgggccaataagcatgtgattaaaaatctgacccgcgatgaagtattaatgcagttagagaagagtctgcaatcgccgcgcgcggtgccgccctggacccgcgaacagtggcaaagcaagctggaacgggaattccaggatatcgccgccctgccgcagcgggcaaaattgaaaattaaacgcccggtcaaggtacagccgatagccagagtgtggtatgccggcgagcagaagcaggtgcagtacgcctgtcccggcccgctgattgcgctcatctcaggcacacacggggtgagcgtgccggacctcggcgagctattgaactacgatgccgataacgtgcagtatcgccacaaaccgcaggcgcagtcgttgagattgctgattccgcgcctgcatctgtggctggctagcgagtagccaggctgcctaccatatcctgcgggcgcacccagctgtcgaattcggcttccgtcaggtaaccaagcgacagcgccgcggctttcagcgtcagcccttcatggtgcgcttttttggcgatctccgctgccttatcgtagccgatatgggtattgagcgcggtcaccagcatcagcgactcattcagcaactggttgattcgctcgcggttcggctcaatacccaccgcgcagtgctcattaaagctctccattccatccgccagcaggcgtaccgactgcaggaagttgtggatgaccattggccgatagacgttgagctcaaaattccctgacgcgccgccgatattcaccgccacgtcgttacccatcacctggcagcacagcatcgtcaacgcttcgcactgcgtcgggttgaccttgccgggcataatggaggatcccggttcgttctccggaatggcgatctcaccaatgccgcagcgcggcccggaggccagccagcgcacatcgttggcgattttcattaacgaagccgccagccccttcagcgcgccgtgggcatgaaccagcgcatccacggtggccagcgcttcaaatttgtttggcgcggtgacgaacggcagtccgctaagcgacgccagttccgccgccacccgcaccgcatattccgggtgcgtattcaagccggtgccaaccgccgtccccccagcgccagctcagcgagatgcggctggctgtgttcaatatggcggagattatgttccagcatcgcgacccaaccggagatctcctgccctaacgtcagcggcgtagcgtcctgcaagtgagtgcggccaattttaacaatgtcaccgaaggccagcgacttttcctgtagcgtggcccgcagcgcctgtaactgcgggagcagcttctcgcgcaacgcgattagcgccgcgacgtgcatggctgttggaaaaacatcatttgagctctggcttttattgacgtcatcattggggtgaattttgcgcgccatgccccgctcgccgccaagcaactcactcgcacggttagccagcacttcgttcatattcatgttgctttgggtaccggagccggtttgccagatagccaacggaaactcctgcgcatgcttgccggcgagaacttcatctgcggcggcgatgatggcgcccgctttgtccgccgccagcaagcccaggtcctggttaaccttcgccgccgcgcgtttggtcagcgccagcgcgtagatcagttcaccaggcattttctccgttgatatacggaaatgttcaagcgaacgctgggtctgcgcgccccaaagtttatcggccgggacgtcgatagcgcccatcgagtctttttcactgcgatgcgttgtcattactttctccttggattcaaagtgcgtcatagcgacaaagctcacctgcttaaaggattaagtattaaccagatttattagttgttttggtcgttcgtgccgctaagcgacccaaacaaaaaccgccccgaagggcggtctcgtttacttcacgcagcgcgagcactgcgacgtctggatctgctggaagaagtcgttacctttatcatcaacgaggataaaggccgggaaatcttccacttcgattttccagatagcttccattcccagctccggataagccacgcactcgaggctgcggatactctgttgcgcgagaaccgccgccgggccgccgatactaccgagatagaaaccgccgtgtttatggcaggcgtcggtcacctgctggctacggttacccttagccagcatgattttactcgccccgtgcgattgcagcagatcgacatacgagtccatgcgaccagcggtcgtcggccccagagaaccggaggcgtaaccatccggcgtcttcgccgggccggcgtagtaaatcggatgatctttgacatactgcggcagcgcttcgccattatcgataagctctttcagcttggcatgggcaatatcgcgggccacgatgatcgtgccgctcagcgacagacgagtcgacaccggatactgcgacagcagcgccagaatctcgctcatcggctgattaaggttaaccttcaccgcttcgccttcaccggcctgacgcaggtgctcagggatatatttccccgggttgctctccagtttctccagccaaatcccctgacggttaattttagctttaatgttacggtcggcagaacaggagaccccatccccaccggacaggaagcgccgtgacgcggcagacggactacgcggatatcgtgggcgaaatatttcccgccgaactgcgcgccgaggccgaggttctgcgcttccagcagcagctcttgctccagttgcacatcgcggaacgcctggccatgttcgttaccttcggtcggcaggccatcgtagtatttagtcgaggccagttttaccgttttcagcgtagcttccgcagaggtgccgccaatcacaaaggcgatatggtacggcggacaggctgcggtaccgagggtgcgcatcttctcgacgaggtagtttttcagcttcgccggcgtgattaacgctttcgtttcctggtagagatacgttttgttagcggagccgccgcccttggcgatacagaggaatttatactcatcgccatcggtagcataaagatcgatctgcgccggcaggttagtgccggtgttaacctctttatacatatccagcggcgcgttctgcgagtaacgcagattgtcctggatataggtgttgtacacgccctgcgccagcgcggcttcatcgccgccgccggtccatacgcgctgtccctttttccccataatgatcgcggtgccggtatcctgacaggtcggcagaatgcctttagcggcgatatcggagttacgcaggaattgcagcgcgacgtatttgtcgttttcgctggcttccgggtcgttgaggatatccgcgacctgctgctgatgtgccgggcggagcataaaggaggcatcgtggaacgcgtgttgggccagtaaggttagcgcctgaggttcaaccttcagaacctcctggccggcgaattcggcgacggagacgtaatcactgctgaggagataatactcggtgtcatcctttttaagcggaaaaggatcctgataaacaaacggtttgttcgacattgtactctcacttactgcttggctgattatgtttcaggcagacactccatttgcctgtagaaaagcgagtcgatcaatcttacacaattttttaacaaaaactgagacaaggacgactttttctttcaacagttgcttctcgacgatttgttggtttaatagagccaacatttatatgtggaaacagggattgagaatgcagaagctcattaactcagtgcaaaactatgcatggggaagtcacaccgcgttaaccgacctttacggtatcgccaatccggacaacctgccgatggcagaactgtggatgggcgcacacccaaaaagcagttcgcggatccttaacgccgacggcctgccgcagtcgctgcgcgacatcattgaggccgataaaaacgcccttctcggcactaacgtcgcagagcgtttcggcgaactgccgttcttgttcaaagtactgtgcgccgcccagccgctttccatccaggttcacccgaataaacgcgcgtcggaaattggctttgccaaagagaacgccgcgggtattccgctggatgccgctgagcgcaactataaagatcccaaccacaagccggagctggtcttcgccctgacgccgttcctcgccatgaacgcgttccgcgaatttaatgaaattgtcgcgctgctgcagccggttgccgaggcgcatcctgccatcggcgaattcattcagcagccggacgccgggcgtttaagccagctgttcgccagtctgctgaatatgaaaggcgaagaaaaagcgcatgcgctcagcgtgctgcaaaacgccctcgatcgtcagcagggcgaaccgtggcagaccattcgtctgatcgctgaattctacccggatgacagcggcctcttctccccgctgctgctcaacgtggtgaaactgaatcctggcgaagcgatgttcctgtttgccgaaaccccgcacgcctacctgcagggcgtcgcgctggaggtgatggccaactcagataacgtactgcgcgccggcctgacgccgaagtacatcgatattccggaactggtggcaaacgtgaagtttgtcgccaaaccggccgctgagctgctgacccagccggaacaacacggcagcgagctggatttccccattccggtcgacgatttcgcattctcgttgcacgatctgaccagcaatgaagcctctctggcgcaagagagcgccgcgattctgttctgcgtggaaggtgaagcaacgctgcgtaaaggcgagcagcgtctgaccctgcggccgggtgaatcggcgtttatcgcctgcaacgaatcaccggtacaggtcagcggcaacggtcgtctggcgcgcgtgttcaataagcttaagtaagttactgaacttttaatccgcagttgctagacttccccatcatgacaacaccaccaggcggcatgttccgcctggtttcatttatggacaatgctatgaaaaaaacattggtcgcggcgggagttatcgtcgcgctcggagtcgtctggacaggcggggcctggtttaccggtaagcaactggaaaaccgtattgccgaaatggtgcagcaggcgaatgcccaactacagagcaatgcgccggaagctggcgtagagctgagctatcaagactaccagcgcgggttattcagcagccacctgcaattggtggtgaagccgcaggccggtaaagaacacagcctgttggccgccggtcagagcctgatttttgacgaaaaggtcgatcatggtcccttcccgcttgcctcgttaaaatcttttaacctggtaccggcaatggcctccgtcaacaccaccctggtgaataacgatgccagcaaagcgttgtttgatatcgccaaagggcagtcgccgtttaacatcgatacccgtattgcctacagcggcgatacccagtcggccatcttccttaatccgctggattacgctaaagacaatgaaaaagttatctttagcggcggccagttccagctcaatgccgatcgcgatggcaaaactatcagcctgagcggcgaagcggccagcgggcagatcaacgcggtcaacgaatacaaccagaaagttcagctcagtttcagcaacctgaaggctgacggcgccaccgaaatgaccgccttcgaagaacgtatcggcaagcagaagatcgcccttgataagctggctatcggcgttgaaggtaaagagctggcgctgctggaaggcatgaatatcgacggccggtcgacgctctctgatgacggcaaacgtatcaatagccagcttgattacaaccttaacagcctgaaactgcaaaaccaggatatgggccgcggcaaactcaccattaagctggataacctcgacggtcaggcgtggcatcaattcagtcagcagtataacgcccaggctcaagcgctgatggcgaagccagagctgacgcagaatccggagctctatcagcaggcgttaaccgagatcttctttagctcgctgccgattctgttgaaaggtaatccgtcgctgacgatttccccgctgagctggcaaaacgccaaaggagaaagcaccctgaatctgtcggtgctgatgcaggacccggcgcaaactaccgccgcgccgcagaccgtcgccgatgaacttgaccgcagcattaaatcgctggacggcaggctggtgatcccagtggatatggccaccgccctgatgactcagattgccgggctggaaggctatcagccggaggatgcggtgaaacttgccgatcagcaggttaaagggctggcggcgatgggccaaatgttccgtctgaccacgatggaagataacgcgattacctccagcctgcagtacgccgacggccaggtaacgctaaacgggcagaaaatgccgctggctgatttcgccgccatgttcggcctgacgctccccaccgccgaaccgcagcagtaaaaaaacgtgccgggctgcgatcaggtagcccgggaaccaccttaatcgatggcggccactactttctgataaccagtcgcggcggcataatctgattacgcgcgctgccttgtccctcctcgagacggcgtaaaatacactccgccaggctgttccccatctcacgcgccggggtagtcacccaggtcaaggggacatcatcgagcgccgcttccggcacttcggcaaaggccgccagcgcgatgcgttgctcaaaataactttccacgctaccctcgccgctctgccgcccggcgcgcagcagaccgaaccacgccccggtggcgatgacgctgttatagcaaagtaccgcgctgatggtcgggttttgtcgcagcagcgcgatcatggcttccgccgcctgctgctgactggagccacactcgacaacccattcactatgaaacggcaggccgtacttcaataaggtggcgcaatagccgcccacccgttcggcgcgggtcagggacgcgctttgcccgccaagccaggcgatgcgctgatgaccgcggcgaatcagatgttccgttaccatttgcgccgcctgcatgttatccgggcggatcaggtcgatatcgtccagatagctggcacgggaggcaaaaaccagcggcatccccacttcggcggcacgatcgcgcagttcgccgcccttgtcgatagcgccggcaataattaccccgtccacgccctgtgagaccagcgtttcgaagcgctggagcattttctcgccgcgatgcccgccctgggtgagaaataccattttaccctgtgattccagcgcatcggtcaacccggcggttagctcggcatagaacggcttcgacagatcgctaacgataaggccaattaccccgctttgcccgccgcgtagcgacgccgcctggcgattacgcacaaacccgagctgctcaatggcctgattgacgcgctcgccggtggccgaagagatgcgccctttaccgctgagcaccagcgataccgtactgaccgagacgccagccgccagcgccacatcattgatggttgtcttttttgcgatagccataacgactggctgactccctttgcctttcgataaaacgttttatcagtatgttatctttataaaccttattatcgcttgattatgtgatttttatcgcactaaaaaatggtaaaacgttttatcttgccgctacgttacatcctatcgacccttttcagaaccaggattcgtgtatgacggcgaaaacagcacctaaaattaccttatgggagtttttccagcagttaggaaaaacctttatgttgcccgtggcgttgctctcgttttgcgggatcatgctggggatcggcagctcgttaagcagccacgatgtgattacgctgctgccgtggctgaacgtgccgctgctgcaggcgatttttgtctggatgagtaaagtcggctccttcgcttttagcttcctgccggtcatgttctgtatcgcaattccgctcgggctggcgcgtgaaaacaaaggcgtcgccgctttcgcgggctttgtcggctacgcggtaatgaacctcgcggtcaacttctggttgacggcgaaaggcatcctgccgaccaccgacgcggcgatcctcaaggccaacaacatccagaatattatcggtattcagtcgatcgacaccgggatcctcggggcggtgatcgccgggattatcgtctggatgctgcacgaacgcttccacaacatccgtctgccggatgcgctggccttctttggcggcacgcgctttgtgccgatcgttaccaccgtggtgttaggcctggtcgggctggtcattccgctgttgtggccggtgttcgcgatgggtatcaacggactgggccacgttatcaatagcgcgggcgattttggcccgatgatcttcggtaccggagaacgcctgctgctgccgttcggcctgcaccatattctggtggcgctgatccgctttaccgaagcgggcggcaccatggacgtttgcggccacagcgttagcggcgcgctgaccatctttcaggcgcagctgagttgcccgacgacgcacggcttctctgaaagcgcgacccgcttcctgtcgcagggtaaaatgcccgccttcctcggcggcctgcccggcgcggcgctggcgatgtaccactgcgcccgcccggaaaaccgtcataaaattaaagggctgctcatttccggcgtcattgcctgcgtggtcggcggtaccactgagccattggaattcctgttcttgttcgtcgcgccggtactgtacgttatccacgccctgctgaccggacttggtttcactatcatggcggtacttggcgtcaccatcggcaacaccgacggcaatattatcgacttcgtggtgtttggcatcctgcacggtctggcgaccaagtggtatatggtgccggttgtcgccgccatctggttcgcggtgtactacggtatcttccgtttcgccatcacccgcttcaatctgaaaacgccgggccgcgatatcgaaacggcggccaacatcgaaaaagcggttgccggaacgattggcaaatcaggttataacgtgccggcgattctggccgcgctcggcggtgccgacaatattgtcacgctcgataactgcattacccgcctgcgcctgtcggtgaacgacatgagcaaagtcgataccgccgcgttaaaagccaaccgcgcaatcggcgtggtccagcttaacgatcacaacctgcaggtggtcatcggcccacaggttcagtcggtaaaagatgaaatggccaccctgatgaataccgttcaggcctaaacatacgccccctctcacccggagggggctctcgcgaaggacgttcagatgtttgattttgccacgccagttgaccgccacgggacctggtgcacccaatgggattatgttgccgaccgtttcggcgccgccgacctgctgccgttcactatctccgatatggatttcgctaccgccccttgcattatcgacgccgtcaaccagcgactggcgcacggcgtttttggctatagccgctggaaaaatgacgagtttctcggcgccatcagccactggttcgccagccgttttcatagccccattgaccacgaggccatcgtttacggcccgtcggttatctatatggtggccgaaatgattaggcaatggtccaatccgggcgacggcatcgtggtccataccccggcttacgacgcgttttacaaaactatcgacggcaaccagcgccgcattgccccggtggcgctcaagcttgatgagggtgagtggcgctgcgacatgaacgaactggaagccgcgctcgcccgtcccgacaaccgcattttgctgctatgcagcccgcataacccaacgggcaaagtctggagccgcgacgaactgaccaccatggcgcagctgtgcgcgaagcataacgtccgggttattagcgatgaaattcatatggatatgacctggggcgaacaccgtcataccccctggtgcgccgttgcgcagggcccctgggcgctgttcacctcgggctcaaaaagcttcaatatcccggcatttaccggcgcctatgggctcatcgccgataccgcttcgcgcgatggctatctgcaagcgctgaaaggccgcgatggtctctcttctccgtcggttccggcgctggtcgcgcatattgccgcctatcgccagggggcgccctggctggatgcgctacgcgattacctgcaggaaaatatgcgctatatcgccgagcagctgaatcaggccttcccacagctacgctggcagccgccgcaggccacctatctggcgtggatcgatctgcgcccgctcggcgtcgacgatcgtgcgctgcaacgcgcgctaattgaagagcaaaaagtcgcgattatgccgggttatacctatggcgaagagggcaacggtttcgtacgcctcaatgcgggttgtccgcgccttaagcttgagaaaggagttcaaggattgattgccgctctgcggtcattacgtcctgacttaaaataattttgatatatctcaaaacttttttaaatgcacaggagtattaaaatagcgctgaactatcacgtccgaatgacaatgcagaggaggaaatgatgaaaacctacgatcgtaaccgtaatgctattgacgctggcagcctggtcatggtggccgacagcggcgcgacgggagtgattaaggctattcatggcgccaataaaaacagcgaacagctgcgccgtagtgactgcgtagaattagacggtagtcatgaattgtattgcccattgaatcttattcgcctgggctttaattaattccagcgttgttgatttaaggccgccctgaaaggcggcctttttcatggctcaatgttcccgcttttgatctcgtcgagtgaatcagaaagctaagcggcgtattatcgcggctcttcacgccctttcggggcgaattaccttctgagttcagaggcatttctatgacatggcaacaattcaaacaagcctggttaatcaaattttgggcgcccgcgcccgcggtgatcgccgccggtattctttctacttactattttggcattaccggtaccttctgggcagtcaccggcgagtttacccgctggggcggccagttgctgcagttgatgggcgtcccggccgaaaactggggttactatcaattaatccatctcgaaggcaccccgctaacgcgtattgacggtatgatgatccttggcatgtttggcggctgcctggccgccgcgttgtgggcgaataacgtcaagctgcggatgccacgtagccgcatccgcattttccaggcgctggctggcggaattattgccggtttcggcgcgcggctggcaatgggctgtaacctggcggcctttttcaccgggatcccgcagttttccctgcacgcatggttcttcgccatcgccaccgccatcgggacctggttcggcgcgcgctttacgctgctgcctgttttccgtatcccggtcaaaattgagaaagtctccgcagcctcaccgttaacccaaaaacccgcgcaggcgcgtcgccgctttcgtctgggaatgttggtatttgtcgctatgatcggttggggactgttaaccgccgccaatcagcctaaattgggcctggccctgctattcggcgttgcctttggcctgctcatcgaacgggcgcaaatctgtttcacctccgcatttcgcgatatgtgggtcaccgggcgtacctatatggcgaaagcgatcatcttcgggatggcggccagcgccatcggtatctttagctatgtgcagctcggcatggagcccaaaatcatgtgggccgggccaaatgcggtgattggcggcctgctgttcggtttcggcatcgtgctggccggtggttgtgaaaccggttggatgtatcgcgccgttgaaggtcaggttcattactggtgggtcgggttaggcaacgttatcggttccacactgctggcttacttctgggatgatttatcgccgacgcttgccaccaactgggataagattaacctgctgacgacttttggtccgttcggcggtctgcttattacctacctgctgttgtttattgccctgatgttggtcatcgcctgggaaaaacacttctttcgccagaaaaccacctcagcaacccgtattaaggaaaccgcatgaaagagatcgttcctgattaccgcctcgatatggttggtgaaccttgcccctacccagccgtggccacgctcgaagcgatgccggcactcaaaaaaggggaaatacttgaagtggtgagcgactgcccgcagtccattaataacatcccgcacgatgctaaaaatcacggctataccgtgctggatattcagcaggacgggccgacgatccgctatctgattcaaaaatgacgcgaagggccggtagcgcgctaccggctgtcattacttgcccgccatccagcgccgataacgtttagcctgccgttttgccgtcagttgcgccgtcagcagcgcccacagtggtgagacctgcggccacgccgcacgatggcggcttaaccgctgaagctggtattttaccgctgccatatgcgcggtggcggcaatagccttgttcttccagttgccctgtcgcagcagtggcgcatcgtactccccctcacgccagtactgcggcagaccggggactatcgccattgccgtagcgatgcccactagcgcaatcccgctattcactaccctctccgccacttcacgccgccgcacgccgccggtaaccattaaaggaatcgtcgcgacgtcggcaatttgctcggcaaactgcaggaagtaggcttcccgcgccagcgtccgttcatcgcgcatggcgcccatcatcgccggcgcttcgtagctgccaccggaaagttcgaccagatcgacgccgctttccgccagcagctgcaccaccctcttcgcatcgttaatcgaaaagccgccgcgctggaaatccgctgaattgagtttaaccaccacggtaaaatccgccgctaccgtctcgcgaacgccgcgcacaatatccagcagtaaacgcgcgcgattttcaatgctcccgccatactggtcggtgcgctggttactgagcggcgaaaggaactggctcagcaaatagccgtgggcggcatggatttcgacgccgtgaaatccggcgcgctccgctaaccgggaagtggtaatgaaccgtcgtgtcacgtcggcgatatccttctcatccattgcccgcggcaggcgaaagcgtgaagactgcgagccaagatccagcgccagcgccgaaggggccagcgtctcttgtcccaggcccgcgggcatctgccgcccaggatggtttatctgcatccacacctgtgcgccattcgccctcgccgcctgcgaccaggcgcggaacttatccagatgccggtcatcatccagcactacgcctgccgggccggtcatcgcccgggcgtccaccatcacattaccggtaataatcaccccggcgccgccctgcgcccaggcctgataaagtgtgagtaattccgttgacggcgcatgatcggcatcggccatattttcttccatcgccgctttagcgatgcggttgttaatgacgacgccagaggccagtcgcagaggggtaaaaagggtcatgtcagggctccagtcagtgaactggacaaaccataaccttaaagttaagtttaaggtcaagcagcttatgaggaataaaaatgaatatcggtacactggcaaaacgcagcggcctggcgccttcgcggatccgttattacgagcgcgcggggatcctcaaaaccgtgcagcgtaaaaccaatggctatcgcagttatccggaagaaacgctggtcgtgctgggactgattactaccgctcaggcagcaggtttcagcctcgaagagatatcatccctcttgccgtcagacctcaaccactgggatcgacaaacgctactcaccaccctgcaacaaaaagtggcggatatcgaaaagctggaacagaaactcgcgcacggtaaagcgcaactggtcaacgttatccgtgagatacaacagaagccggatgacattgactgcgccgctaatgcacggcgcgtgttatctcaggtgctggatgtgcaggaccggacggcgaaggaagaatagctaccagcctttcaccgcatcgcctttatacaattcggcggcggcgttggcgacttcgtcggtctggtaggctttcaccaggttcttcacctttgcgctgtctttattatcttcgcggctggcaaagatattgacgtacggtgaatttttatcctcaatgaacagaccattacgcgtcggcgacaggccaatctggctggaaaaggtggtattaatgatagccatggtcacctgtttatcatccagcgcacgagtcagctgcggtgcttcaatctcgacgattttcagcttcttcgggttattgacgatatccagcgccgttggcagcaggccaaccccctctttcagagtgatgagcccctgatgctccagcaataacagagaacgcccaaggttggttgggtcgttaggcaccgccacctgggcgccgtccggaagctgtgaaatagcggtgattttctttgaataagcggcaatgggatagacaaatgtggtaccaacatccacaagcttatagccgcgctcctggatctgtttatcaagatagggtttatgctggaaagcattgatatcgagatcgccattattcagcgcctcgtttggcagaacgaaatcattgaaagtcaccacctcgacatcgagattatatttctgtttggcgactttttgcaccaccgcccagacttgctgatcgatacccgcgctaatccccaccttaatatgattaggatcctgatcttttggcccacaacccgctagcagcaacgcgctaacgagggccaatgaatgagttaaacctttaagtgaaaaagccattttcccggcgtccttttaatatagcctgctaacgatggcaggaatgtcagtccgggacactatataaaagcatctttataagattaaatactgattcactatgagtaatagcgaaacgctattgataagtctccacgctgtttttcctcccctgccgttgaaacgctgacatcttgtgcagaagcaatattttgtaacacttgaaacactgttccaataccattacacacattaaaattaagcttatattattagcattataataaatagataagtgaacgtttcctatacatcagctgtataggatgccgtttcgcacgcacacacaacccacaaggaaaatcatggagcttctggatttgctcagaaccatttttgagcgagtacgcactgatgcggattttatttcatttactgatgtacttatcgaaaataatgtctcttattacatctattttgtcgctaccgggaatgtgaattttgttatgtcatcagatactttcgtttccctgaaaagcaacagaaagttgttgcgggttaattcccagtcctgcagagcgctcacccgagatgccgcccgacgccactttagcggtattaccacttttgatatctattgcgccgaactggcaaatgccggggtattcaagtgggtggttgatctcaatgaaaaaacgcggcactactggtcaaaagacaatacgttattgcatatggaaaatatgattctgcccttttgatcgcagaaattattcaatgctcagccaaatattaagcagccctgcagttgattttctttcagggccgctcatcgcctgcgattgcgcaacgcagcaaaaaagtggcgctttatatgcgcaaaaagagtcttcgcactgttcatctctctgtatccacaggattttttccgtacttttaaacagttatgctgctgatgtataatatcgtgcacttcaactaaaaaatgagtgcgaccatgattgattcaactttgcctttaacagacattcatcgccatcttgacggcaacatccgtgcccaaaccattctcgatcttggccgccagttcaatattactctcccggcagacacccttgaaacgctgcgtccgcatgttcaggttaccagccatgaacccgatctggtcagcttccttgcgaaactcgattggggcgtgaaggtgctggcttctctggaagcctgccgccgcgttgcctgggaaaacgtggaagacgccgcacgcaacggcctgcactacgttgagctgcgtttttctccacgttatatggcgatgagccatcaattaccggtcgccggcgtcgtggaagcggttatcgccggggtacgcgaaggctgccgtgatttcggcgtcgaagcgcgtctgattggcatcatgagccgcaccttcggcgaagcggcctgtgaagaggaactcgacgccctgctggcccatcgcgatgggatcaccgcgctggatctggcgggcgacgagctgggattccccggcgcgctgtttatggatcatttccgccgcgcacgtgacgcgggttggcgtattaccgtccacgcaggcgaagccgccgggccagaaagtatctggcaggccattcgtgaattgggcgccgaacgcattggtcacggggtgaaagccgtgcaggatccgaagttaatggacttcctcgcctctgaacgtattggcattgaatcctgcctgacgtcgaatatccagaccagcaccgtcgcctcactggcgcagcacccgctgaaaaccttcctcgaacacggcgttctggcgtgtattaacaccgatgatccggcggtacaggggtggatattattcacgagtacaatgtcgccgcgccggcggcgggtctcagccgtgagcagatccgtcaggcgcaaattaacggtctggaattggcattcctcagccgtcaggaaaaagaggcgctgatccaacgcgtgctgcaggctaattaagccaaagcttcgccgcgcaggcggagcatgctgttaaaacaggcacagcgccgcccggtgccgtgccgattcaatacccagttcaatcagctccataatctgaatcgcctggcttgcaggtaccggattttccccgcagccgttgagcgcatcgcggatcgccgcataataagcgggatagttcccgggcagcgtcagccaggtttcctcgacgcgcgcttcatcttcaacgcgggtcaagattccgtcgcgcatatcgtacccccaatcctcctgcggcagccgctcgccgtttttcaaacgctcctcctgcggatcgagaccatatttcacatagcttcctcgtgaaccgtggacgatataacgcgccgtttccgccgccgccagcagcgtactgtgcaaaatcactctccgttgcggataaattaacaccgcatggaaataatccgtcgcctgcgcgccaggacgctgctgcgccagatcgacggcgatactcaccggcaggccaaacagatcgaccgcctgatccagcagatgggggcccaagtcataccagataccgctgccaggaccgccctgctcacgccagcggtcacgaacctgcgggcgaaagcgatcgaaatgtgattcaaaataactgacctccccaaatcccctgcggcaatcaaggccttcagcgtgagaaaatcgctatcccaacggcgattatggaacaccgataacagccgcccgtgacttctggcgatggcatccaactcacgcgcctgtgacagtgtcacggtaaaaggtttgtccacaatgacatgtttgcccgcctccagcgccgctcgcgccagcgggaaatgggtatcgttgggagtcggtataacaatcagatcgatatcagggtccgcatttagcgaattcgctgaagtcaccacctgggtcgccggccagtccgccagcactttctgcgcatcgctactgaccacggccgacagggccatgcccggcgtaccggaaatcaatggcgcgtgaaatgtcttgcttgcataaccataacctatcagccctacccgtatagcatcactcatgacgtcatcctcgtgcgcaaccatgacttcaactataaaccgcaatctttcgattatccgtgcacgctgttcatctttgcgccagttgcgcaatgcgtgggcagtaatacttgcgttgtttccgcggtttagtaacatttcaatccattttaactttccgctttagaattatgacgactgtttttacccgcattgtagaacttattggctgggttgtttttggcgtttcggctgtgctgttggtggttgcgcatcaaatcgatgattatcagtccccgcctccggccaacaccgtacaggcgaaataacggcaaagagtgatactcgccgcaaatctgcaaccggtttcagaaaccggttgcagatttgtcgcgccattcaatacactctctttatcacttgataaggagtttttttgatggccgcatttccgcaagattttctctgggggccgcaacggccgcctaccaggttgaaggcgggcacgatgccgatggcaaaggcccttctatttgggatatctactcgcaccagccgggaaccacctttcagggcaccaatggcgatatcgccgtcgatcactatcaccgctttcgtgaagatgtcgccctgatggctgaaatggggctacaaagctaccgcttttctatctcctggcctcggttattgcctcgtggccgtggtgaagtcaatgaaccaggcgtgcagttttacagcgatctgatcgacgaactgctggcgcacaatattgaaccgatgatcaccctttatcactgggatttgccccaggcattgcaggatgaaggcggttgggaggctcgcagcaccgcggaagccttcgccgaatacgcacgtctgtgctatcagcgcttcggttccagggtcaagctgtgggcaacctttaacgaaaccattgtatttattggccacggttatattaatggctgccatccaccggcggtacgcgacccggctcgcgccatccaggcttgtcaccatgtctttatcgcccacgcgctggccgttaagaccttccgtgaaatgaacattaacggccagattggtttcgttaacgtcctgcagccccatacgtcgttgacgcaaagcgccgaagacattgaggccaccgcgttggccgatgctatccatacccactggctatacgatccggtactcaaaggcgcctatccagacggtttgcttcgacaggctcaggcgctgtggaacgtaccgcgcttcgcaccgggcgacgacgcgctgctcaaggaaaaccgctgcgattttatcggcctgaattattatcgtcgggagacggtctccgccacgccgcaagatggtccaggcgtcggcgagtccggagtggatggattattttattttgtccgcaatccgcaaagtacttataccgaatggggttgggaaatttggccgcagggattaaccgacggcatcatgatgataaaggaacgctatggcgatattccaatctatatcaccgaaaatggtttaggggcgaaagatccgattattgacggtgaaatagtcgacgatccgcgaattgactacctgagtagccacattaatgcgctggaaaaggcaatagcattaggtgcggatgtccgcggtttttacccgtggtcctttattgacctgctaagctggctcaacggctatcaaaaacagtatggctttgtctacgtcgatcaccagcagaaccgcgctcgcaaacgaaaaaagagttatttctggtaccaaaacgttattgccagccgaggcgaacagcgttaatcttccccctcaggcgccgtccggcgcctgatctggttgtagaatattcttaaatttctttttacgctgccaggatcctaatcagttcttgtttttagtattggcaaccgaaataattccgccggcccatcaagaaggcgctgttagttgaaacacggtttacagaaaattggtaatattcgacttaattccgattattaaatggatacacaaatgaccgttcaggattatttattaaaattccgcaaaattagttcgctggaaagcctcgaaaaactttttgatcatcttaactattctctctctgacaccaatgaaatcgtcaacatgtatcgcgccgccgatcatcgccgcgccgagttagtctctggcggaaaactgttcgatgtaggccaggtaccgaagtcggtgtggcgttacgtgcaataaagactgttatcattcacgccagttgcttatacttcccgccctgaaattaactaactggcgttgaatccgggggttaagatgtcctctcaatctgcagaacgtatcggcggatggctactggcgccgctggcgtggttactgctcgcgctgctcagcacttccctatcattaatactctatgcgaatgcgctgatggcaccgcagacctgggcattgctgaaagccatgagtttcggccacctggcgctatggctggcttcactgctgttcgccgtcgcgatgtggtattataccctgtggctgacgatagcgtttttcaaacgccgcgcggtggtacccaaacactacattatctggctgcttatttctctgctgctggcgattaaggcgttcgctttttcgccgatttcggatcttctggccatgcgccagctgctgtttccgttgctcgctgcggcactgtttgcgccctatttacgacgctctgcgcgggttaagcggaccttcgtcaatccgtaataaccacacagttcacctgttgtcgccggtatcgatttattcgataataggcggcttttttttgtttcaggtccaataatggctgattatttactgctctttgtcggtactgtccttgttaataacttcgtgctggtgaagtttcttggattgtgcccgtttatgggggtttccaaaaagctggaaaccgctatggggatgggactggccaccaccttcgtgatgacgctggcctcgatttgcgcctggttgattgatacctggatccttatcccgctgaaccttgtttatctgcgcaccctggcctttatcctggtcatcgcggtagtggtgcaatttaccgagatggtagtacgcaaaaccagcccggcgctgtatcgcctgctggggatcttcctgccgttaatcaccaccaactgcgcggtgctcggcgtggccttgttgaatattaacctcgggcataatttcctgcagtccgcgctgtacggtttcgccgccgccgtcggcttctcgctggtgatggtattattcgccgccattcgcgaacggctggtggtcgccaatgttcccgcgccgtttcgcggtaacgcgattgcgctggtgaccgctggattaatgtcgctggcatttatgggctttagtggtttggtgaagttgtaatgagcgctgtctggatagccgtgatcgctatcagcctgcttgggctgattttcggcttaatactggggtacgcgtcgcgccgttttgcggtggaagacgacccggtggtagaaaaaattgatgagctgctgccgcaaagtcaatgcggccagtgcggctttcctggctgccgtccctacgcggaagccgtgggtactcagggcgaaaaaatcaaccgctgcgcccccggcggtgaagcagtcatgttaaaaatcgccgagttattgaacgtcgatccgcagcctattgacggcgatgagcagcagcaagagccggttcgcatgttagcggtcatagatgaagccaactgtattggctgcaccaaatgcattcaggcctgcccggttgatgccatcgttggcgcgacccgcgccatgcatacggtaatgagcgacctgtgcaccggctgtaatctctgcgtagccccctgcccgactcagtgtattgacctgcgtccagtcgctcagaccaccgaaacctggaaatgggacctgcaggccatcccggtacgcaatattcctgtggaacaacatgtttaagttattttccgcttttcgaaaagacaagatctgggacttcaacggcggtattcatccgccggagatgaaaactcagtccaacggtacgccgctgcgtcaggttcctctgccgcagcgttttgtcattccgctgaagcagcatatcggcgctgaaggcgaactgtgcgtacaaccgggcgacaaagttctgcgcggtcaaccgttgacccgcggctttggcagaatgctgccggttcatgccccgacttccggaacggtgacggctattgccccccattccaccgcccacccttccgcgctggcggaactcagcgttattatcgacgccgatggcgaagactgctggatcgagcgcgacggctggagcgactaccacaacaagtcgcgtgaagaactgattgagcgcatccaccagtttggcgttgccggtctgggcggcgctggcttccccacgggaacaaaactgcgcggcggcggcgataaaatcgatactctgattatcaatgctgcggaatgcgaaccctatatcaccgctgacgatcgcctgatgcaggattgcgcggcgcaggttgtggaagggatccgcatccttgcgcatattttacagcccaaacaggtgctgattggtatcgaagataacaaaccgcaggccatttccatgctgcgcgcggtgttatccgacgcctacggcatagcgctgcgggtgatcccaacgaaatatccctccggcggcgcgaagcaacttacgcaaattctcaccggtaagcaggtgccgcatggcggtcgctcctccgatattggcgtcctgatgcagaacgttggcaccgcttatgctgttaaacgcgcggtgatcgacggcgaacccttaaccgagcgcgtcgttaccttaaccggcgaagcgattagccggccgggcaacgtttgggcgcgcctcggtacgccggtgcgccatctgctgagcgatgccggtttctgcgccagcgccgagccgatggtcatcatgggcggcccgttgatgggcttcactctgccctggctcgacgttccggtcgtgaaaatcactaactgtctgctggctccgtcggtaactgagatgggcgaaacacaggaagagcaaggctgtatccgctgcagcgcctgcgctgatgcctgcccggcagatctgctcccccagcagctgtattggtttagtaaaggccagcagcatgacaaagccactacccataatttagccgactgcatcgaatgcggcgcctgcgcctgggtttgtccgagcaatattccgctggtgcaatatttccgtcaggaaaaagcggaaattgccgccattcgccaggaagagcaacgcgccgccgaagcgaaggctcggtttgaagcgcgacaggcgcgtcttgaacgtgaaaaagccgcgcgccaggagcggcacaaaaaagcggccgtacaaccggcggcgaaagatcaggatgccataaacgccgcgctggcccgcgtacgtgataagcagcgtgacgcggcgcagccgattgtcattcagtccggcagcaaaccggataacagcgaagcgattgccgcccgcgaagcgcgtaaggctgaggcccgggcgcgcaaagctgaacagcaagccgctgtagaatcgacaactgaggctgccgatccgcgtaaagccgccgttgaggccgccattgcccgcgccaaagcgcggaaagccgcgcagcaggttgaaaacgccgcaccttctgccgaaagtgaagcagcggttgaggctgcgcccgcggtcgatccgcgcaaagccgccgttgaggccgcaatcgcccgagccaaggcgcggaaagccgcgcagcaggttgaaaacgccgcaccttctgccgaaagtgaagcagcggttgaagctgtgcccgcggtcgatccgcgtaaagccgccgttgaggccgcaatcgcccgagccaaggcgcggaaagccgcgcagcaggttgaaaacgccgcacctgctgctgaaagtgaagcaacggttgaagctgtgcccgcggtcgatccacgcaaagcagccgttgaggccgcaatcgcccgagccaaggcgcgtaaagccgcccaacaagcagaacaacaacccgcgccggatgccgccaatgacgacccgcgtaaagcggccgtcgcggcagctatcgctcgcgttcaggcgcgtaaagcaacacagcaggcagttaacgaggaataaatggttttcagaatcgcaagctccccttatacccacaaccagcgccagacctcgcgaattatgctactggtgctgctggcggcgctccctggtattatcgtccagagctggtttttcggctggggtactctgttgcagattatcctcgcggccttcaccgcatggggaaccgaagcggctattctcaagttgcgcaaacagaatatcgcggcaacccttgcggataactcagccctgctgaccgggctgttgttggccgtcagtattccgccgctggcgccgtggtggatggtggtgttgggcaccgcctttgcggtagtcattgccaagcaactgtacggcggattagggcataaccctttaatccggcaatgatcggctatgttgttctgctgatctctttcccggtgcagatgacctcctggttaccgccgcacgaaattgccgctcaggttcctggctttatggatgcgctacaggtcattttcagcggccataccgccagcggcggcgacatgaacagcctgcgcatgggaatcgacggtatcagccaggccacgccgctggatacatttaagacttcgctacatgccggacacagtgcaaaagagatcctgcagtatccaatttatggcggccaactggctggcctcggctggcaatgggtaaacctcgcctggctggctggcggtctgttcctgctttggcaaaaaaccattcgctggcatatcccggtgagcttcctgctaagtctcgccctctgcgccactctcggctggattttctcgccggaaaacctggcctcgccgcaactgcatctgctttccggcgccactatgctcggggcgttctttatccttaccgatccggtgactgcatccactaccaaccgcggacgcctgattttcggcgcgctggcaggtttactggtgtggctaatccgcagcttcggtggttatccggacggcgtcgcctttgcggtactgctggcgaatattaccgtcccattgattgactactacacgcgtccgcgcgtgtatggccaccgttgaggagtcgcgatgttaaacagcatgcgtaaacacggcatcacgctggcgctctttgccgctggctctaccggactgacggccgccatcaatgagttaaccaaaaacaccattgagcagcaggccgcgctgcagcaaaaggcccttttcgatcaggtcctgccagcggagagttataataacgacctgttgcaaagctgttatctggtgaccgcgccgcagttaggcaaaggtcaacataaggtgtggattgcaaagcgcaacgatatgccggtcggcgcggtgatggaagccacggcgccggatggttattccggggcgatacagctgctggtcgctgccgactttaaaggcaccgttctcggttcacgtgtcaccgagcatcatgagacacctggtctcggtgataagatcgaactgcgtatttctgactggatcacccacttcagcggcaaggttatccatggtcaaaatgatagccactgggcggtgaaaaaagacggtggtgatttcgaccaattcaccggcgcgaccattaccccgcgcgcggtggtaaatgccgttaaacgggcgggcctgtatgcgcaaacgctgcccgcgcagatccctgaattcaccgcctgcggagactaagccatgagcgaagtaaaagacgtcattgttcaagggttgtggaagaataactcggcgctggtccagctgctggggatgtgtcccctacttgcggttacctccacggctaccaatgccctgggcctcggtctggcgaccacgctggtgctaacgctaaccaaccttactatctccagcctgcgccgttggacgccggcggagatccgtattccgatctacgtgatgatcatcgcctcggtagtcagcgtggtacaaatgcttatcaacgcctacgcttacggcctgtatcaatcgttgggtatcttcattccgcttatcgttaccaactgtatcgtggtgggacgcgccgaagcgttcgccgccaaaaaagggccggcgctgtcggcgctcgatggtttttccattggtatgggcgcgacctgcgccatgtttgtgctggggtcgctgcgcgaaataatcggtaatggcacgctgtttgatggcgccgatagcttattaggcagttgggcgaaagtcctgcgcatcgaagttttccataccgatacgccgttcctgctggcgatgctaccgccgggcgctttcattggcctcggtatgatgctggcggtaaaatacctcattgatgagcgtactaagcagcgtaaggcgaaagcggcgcaggccgtctccgtcgccccaactgatgtgacagggaaagcgtaagatgaataaagccaaacgcctggagatcctgaccaggctgcgggacaacgacccgcacccaaccaccgaactcaatttcacctcaccgttcgagctacttatagcggtgctgctgtcggcgcaggccaccgatgtgagcgtcaacaaagcgacggcgaagctctatccggtcgctaatacgccggcggcgatgctggagcttggcgttgacggcgtgaagtcctatatcaagactattggtctgtttaacagtaaagccgaaaacgtcattaagacctgtcgcatcctgctcgagcagcataacggtgaagtgccggaagaccgtgcggcgttggaggcgttaccgggggtcggacgtaaaaccgctaatgtcgtgctgaataccgcctttggctggccgactatcgccgtcgacacccatatcttccgcgtttgcaatcggacacaatttgctcccggaaagaacgttgaacaagtcgaagaaaagttgttaaaggtggtgccggcggagtttaaagttgactgtcaccactggcttattcttcacggccgttacacttgcatcgcgcgaaaaccgcgctgtggctcctgcctgattgaagatttgtgcgagtataaagagaaggtagagccctgagttctgcatatctgctgaatattgccgttcccgccagctgccgctattttcatcatcgttcgcctgaagccataccctaacctgtggttatggctctatttttcaccaaccataccgataatcacgccataatattgccatttagatggataattatgcggttatataacgagcagtcagcgtattcgttttttaccgtcgaaaattttctatgtatttgtgatcaagatcatccacgcaacccatcgttaaattgctgttgcaaaaatgctgcaaaaagccagcaatttcaatatcagagccttacgcaccaggacaatgaactgcttatttttaggaatataggccatcacactgccttcaaggtcaaaaagcagaatatatcgcctttatccccacaatacccgccaggcacagattaaaatatcaggtttagctaaaaggtgaaatttaactctgtataacatttgtatgactggctaattatagtggcttagttatgtgtaacagagtattacaaagctattgcctgatgggcaggatagtgaacattacttgccgttttccctccaagaataactataaaggcggcggtccttcgggattgcgccccaaacagcccccgttaatatgggatgtaaaaaaagaggtatatgtgtcaactgcaaacaataaaccagcagaaagcgtgagtttgaacgctttcaaacaaccaagagcgttttatctcatcttctccattgagttatgggagcgttttggttattacggcctgcaagggatcatggccgtttacctggtaaaacagctgggtatgtcggaagcggattctatcaccctgttctcttcctttagtgcactggtttatggcctggtcgctatcggcggatggctcggcgacaaggtacttggcaccaaacgcgtcattatgcttggcgcgattgtactggctatcggctatgcgctggttgcctggtccggtcacgatgccgccatcgtctatatgggtatggcgactatcgccgtcggtaacggcctgttcaaagccaacccgtcttccctgctctctacctgctacgataagaacgacccgcgtctggacggtgcattcaccatgtactacatgtccgtcaatatcggttccttcttctctatgctggctacaccgtggctggcagcgaagttcggctggagcgtggcgttcgcgctgagcgtcgtgggcatgctgattaccgtggttaactttgccttctgccagaagtgggttaaacagtacggttccaaacctgacttcgcaccggtgcatgtcggcaaactgctggcgactatcgtcggcgtagtcgtgctggtcgcgattgccacctggctgctgcacaaccagggcatcgcacgtatggcgctgggcgtcatcgcgctgggtattgttatcatcttcgctaaagaagccatggcgctgcagggcgcggcgcgtcgtaaaatgatcgttgctttcctgctgatggttgaagcgattgtattcttcgtactgtacagccagatgccaacctcgctgaacttcttcgcgatccgtaacgttgagcactcgattctgggtatcgcgttcgaaccggagcagtatcaggcgctgaacccgttctggattatgatcggtagcccgattctggcggcgatttataacaagatgggtgaccgcctgccgatgccgcataagttcgctatcggcatggtactgtgctccggcgctttcctggtactgccgctgggtaccaaattcgccagcgatgccggtatcgtctccgtcaactggttgatcctcagctacgcgctgcagagtatcggtgaactgatgatttccggcctcggtctggcgatggtggctcaactggtaccgcaacgtctgatgggcttcatcatgggtagctggttcctgaccaccgcaggcgccgccatcattgcaggtaaaatcgctaacctgatggcagtaccggaaaacgtgaccgacccgctggtttctctggatgtatacggccacgtgttcctgcagattggtatcgcgaccgcagtcatcgccttcctgatgctgctgaccgcgccgaagctgaaccgcatgacgctggacgacgacgctgtcgccaaagcgcgcgaaaccgcaaccgcttaaatgctccgggaaaaccaataaatttaggccgctaacgtttgttagcggctttttttttgtccctgggcggactaacatacagaaaactgcagccacgaggagttactgatgaaactgttctacaagcccggcgcctgttcccttgcctctcatatcgccctgcgcgaaagcggcctcgactttaccatcgatagcgtcgatctggcgaagaaacgcctcgaaaatggcgacgactacctgctgattaaccctaagggtcaggttcccgcgctgctgcttgacgacgaagtgctgctgaccgagggcgtggccatcatgcagtacattgccgaccgcgtgcccgaccgtcaactgctggcgccagtgggcaccattgcccgctatcagacactggaatggctgaattacgtcgccaccgaattacataaaggcttcacccgctgttccgcccggatacgccggatgactacaagccaacggtgcgtgccctgctggagaaaaagctgcagtatgtcgatgaggcgctgaaagataaacagtggctgaacggacatcgcttcaccattgctgatggctatctgttcacggtactgcgctggggctatgcggtgaaactgaatatggaagcgtacgcaaatattggcacctggatggcgcatgtcgcggcgcgtccgtccgttgcggcggcgctgtcggcggaaggtctgaagtaaacccattggcatgcccgcaagcgggcatgccatcgcgcttacagttgcgtagcgctgaagtaatgctccggtttggcgatgcggtcctgtgccgccaccacctgcagttcatactcctgcatatttttggttgccagcatgatttcatacactgcggcagtaacgtgttcaagggcatcgcgcaggctggcgccctgcagcagcttaaccagcagcaggccgctggtcacatcgcccacgccgaccggctgacggctgccaaaatcgaccagcgggcggctgatatgccaggcttcatccgctgtcaccagcaacatctcaaagcgatccatactcatccccgcccgcgccagatgcttcaccagcacgacctgcggtccttgcgctatcagctcacgcgccgcgctaacggcttcgtcaacgttagcaatcggatggccgcacaggatctccagctcgacaagattcggcgcgatgatatcgctggccggcaacgcatagcgtacgtggaattcagccaccccaggggcgacgatacagcctttttccgggtggcccatcaccggatcgcaaaaatatttcgctgccggattcgccgctttcacctgacgcacgatgccgagaatatgttcgccctgctcggcggagccaaggtaaccgctcagtaccgcatcgcagctctgcagcttatcgatatcggcaatcccctgcacgatttcggtcaaatgcgaaggcggcatgacgcagccggtccattttccgtattgcgtatggttggagaactgaaccgtattgagggccagacgttggcgccgagacggcgcatcggaaattcagcggcgctgttgcccgcatggccaaacacaacgtgagactgaatggcgaggatgttcttcattttcttaccacaaccctaaaaagaaaaagggcgtggtttcccacgccctggttttattttttatttccagcagatcaggcagtaattcttcttaccgcgacgcagtaaggtgtagcggccaaacaggcaatcgctatcgctgaatacatattccggatcggactgtttttcaccgttaatggtcaccgcgttggaggctacggttttacgcgcctggccgcgggacggctgcagctcggaatccaccagcgcctgcagcagatcggcgcctttttccatttcgatcatcggcacgccgtcttgcgccagctgttcgaaatccgcttcgctcaggtcgctcagattgccgttgaacaggctttcggtaatgcgcttcgccgcttccaggccttcttcgccgtgaaccagacgcgtcacctgctctgccagtacgtactgcgcgcgcggcgctttaccgctgttcttatcttcttcttccagcgcattgatctcgacaatgtccatgaaggtgaagaacttcaggaagcgataaacgtctgcgtccgcggtgttaatccagaactggtagaatttgtacgggctggttttcttcggatccagccataccgcgccgccttcggttttaccgaacttggtgccgtcggccttggtgatcagcggaacggtcaaaccgaagacctgattctggtgcaaacgacgagtcaggtcgataccagaagtaatgttgccccactgatcggagccgccgatttgcagcgccacaccgtgcagtttattcaggcaggcgaagtcataaccctgcagcaggttataggaaaactcggtgaaagagatcccttgatcgtcacggttcaggcgctgcttcaccgcttctttattgatcatctggttcacagagaagtgcttgccgatgtcacgcaggaaggtcagcacgttcatgccgccgaaccagtcgtagttattcgcggcaatcgccgagttgtcgccgcagttgaaatcgaggaatggcgcaacctgtttacggattttgtccacccactgctgcacggtatcttcggtattgagtttacgctcagcggctttgaagctcgggtcgccaatcagaccggtcgcgccgcccaccagcgccacaggcttgtggcctgcctgctggaagcgtttcaggcataacaatggaacaagatgccccaagtgcaagctgtcagcggtaggatcgaagccgcaatagagcgcgatcgggccttgcgccagtcgctctgctaacgcttcttcgtccgtcacctgggctaccagcccccgctcttgcaattgtttaatcaagttactgcttgccatcaaattctccatgtataaacgactgcacctttgccggtacacgacttttcgccagacgcgaaaggtacatagaataaagcgccggagcacgtagcaccagcgcttaaaacaacattttgcgtcctttatggcgccagacggtcgatttgccagccatcattttgccgctggtataaaaagcggtcgtgcagacgatgttcgccgccctgccagaactccatttgttcgatgctgacgcggaaaccgccccagaaactcggcaacggcacttcgccttgctggaatttctgtttcaactcgaggaatttactttccaggatcccacgcgcggagatacggctggactgttgggagacccaggcgccgatctggctatcgcgcggtcggctgtggaaatacttcaccacttccagcgtcgacagacgctctgcctggccgataaccatcacctgccgctccagcatatgccagggaaacagcaggctgatatggggatttttttcgatttgatgtgctttgcgactaccctggttggtataaaacaccagccctttttcgtcatagtgctttaacaatacgatgcgttgatagggctggccgttttcatcaacggtcgcgaccaccattgccgtcgggtcggcgagcttagcgtcgcaggcctgacgcaaccaacgttcaaataacgtcaggggttcggcgggaagatcgtggcgacgaaggccgccacgggtgtattcacggcgcagatgcgcgatttgctgcaattcgtcgttatcagacataaccattgagatcgttgtcatagggtggcgttattgtgctccccgctacggaaatctcaacgtttcgcggtctgcaactggcagttgtccagtacgacgcggtcgcgcttataaacggtggcgctgtcgcccttcgaccagaagacataaacgccatcagtataacgagccccggaagccgaaagcccctgggtcaggtttaattgctgattatcatagataaaactaacctgctgacgcgcgttgttctgatggacggtcaacggtttttgatcgcactgatattcaagggtgtcggtctgcatccgttcaacgaattggttgtaatagctacaccctgccagcatgaaagggactaccgcaataagaatttttttcatgagtatgccttcgactttcccggtcaggagagcaaaccgccctcccggaatttcgtccagtttaccggtaaataaaaaatagcgacttcagttaactctgattctgcgctcgattcgcgggataaatggcgccaagaatggtcgcttcactggcgccggtgacggaaggaagattacccggcaggccagcaagcgtacgccacgccagccacgcaaaggccaacgcttccatatcgtcgccgctgatacccgcgtcatcggtggtcgttacttcagtacctggcagcagcgccgccagacgcgccatcaacagcggatttcgagccccgccgccgcaaactaacaaacgctcgcagccgccgcttaacaaaacctgctcactgatggtcactgcggtcagttctgtcagcgtggcctgaacatcctgccctcgcagatgggtaaagcgcgccagatgtttttccagccaaccataattgaaatactcgcgaccggtgctcttcggcgcgggtaacgcgaaccacgggtcgcttagcatatcctgcagcagcggtagtaatactttgccttcactggcccattgcgcgtctttatcgtagggtttaccacactggcgccaaatccaggcgtccatcagcatatttcccggcccggtgtcgtaaccgcgtaccggctgccccggaaccagcaaggaaaggttggctatgccgccgatgttaagcaccatgcgccgttcaaccggatgcgccaacagagcctgatggaaggctgggacaagcggtgcgccctggccgccaagcgccatatcgcggcggcggaaatcccccaccacggtcacgccggtatgcgcagcgatctggttgttatcgcctatttgcatcgtgtgcggcgcatcgccggtcggttcatgccacaccgtctggccatggcaaccgatagcgacgacatcctcaggctgaaggttttgctggcgcatcagcgctaatacagcatccgaaaaaagccgtcccaaacgggtatcgagtcgccccagttgtgacaaggtcagctgttgcccctggcaaatcgctaaaatatcttctttcagattgaccgggatggggtacgagaggctcgcctgctgcgccaccatgttttcatttattgccgccagaacaacatcaacgccatcaaggctggtgccagacattacgccaataaaacgacctgatttcatacgcctaccctcattccatgacttttgcagtgccatcagtgcatcataaagcaacgtgcaatgctatggtgcactaatactttttaacaatagttctgccgcgacaatttgttagataaagtacttacgtttatccgtcgttaaagcgaaccttattatttttaaacggtccataaggaagctatgccagcgaacgcttaaatgccatataattgaccacatggaagttcactggaacattttggtacacaggagattcataaatgattttacgtgttttggctgtctcgatgattggcttaaccctggctggttgcgtcagcagcagcggtctatccggcgatgtttacacagcatcagaagccaagcaggtgcaaagcgtgacctacggtaccatcgtacatacccgtgcggtccagatccaaagcggcgatgacagcaatgccatcggcgcaattggcggcgcggtactcggcggcttcctaggtaataccattggcggcggtaccggtcgttctcttgcaaccgctgcaggcgcggttgccggcggcgtagccggtcagggcgtacagggcgcgatgaacaaaacgcaaggcgttgagctggaaatccgcaaagatgacggcaataccatcatggtggttcagaaacagggcaaaactccgttctccgttggtcagcgcgtagccattgccggcagcggcagtcaagtgacggtttccccgcgttaagcctctctaatgcggccttaattggccgcattgattctccagattcattattcctcaccaaaaacattcatcatacatatattaattttattgatatttctgcacggcaacttgcgtttgcgcaatattttccgttaattaattcgttagcctgaagtggtctttctcatttagcgacctgcgcgtcgtttttatccgcccttttatcgcgggagtttgcctgtgcttctgaatttaaatcaattatcgcaccgcttatttgcttatatcatcgcctgcagcctggcaatcattacgattgatttactatctgattcagtcgttaatcgtattcctacgacttcatcaccacttttccctttgctgacaattatattaatggtttttcacattactatttcctgtttcatgagcatgaagtattggtgtgataaaaaccgcctctatctgatgcctatcgccttcgcctttgccagctccgccctgttaatgatgggaacccttagcagttacccaggctggctactgtgcaacagcgaatatattgttagacaaaatgacgcgctgatcttttattcgttccgcaatattctgatggcagtgctatttgtcactgccattataatatatcgttttcgccagaaccttaatcaggtggccggcgcacatactgcaatactgacgggatgttttatttttagcgctaccattcttattttatcgtggttacactccagtaacagcccattattaagcattgattttatcgacgatatcaccagcacttttactccgttatggcataactggatgggctggttgctattttacacctgggtatttacgttgatattattggttgtactaacccggctacgtaatattttctggtacagcggcgcatttttctgtgccgcctatatatttacgctaaacgtattactcacagcgacaggtagtcagcatattatcgcctggaatcaggcgcgcctgttcgaaaccttgagtacgttatttatgctgttcgtcctgttaagtgacgtttttattctctatcgcgactcgaacaacaaatacatcaattcgtatcaaaactctatccgcgatccgctgaccaggctgtataaccgtagccacttttacgacacgttgaacggactattgccgcatacgtcagcaacgcaaccgctgtcggttatcgttagcgatctcgatcactttaagcgtatcaacgacaactacggtcatgttcagggtgacaaggtgattcaatttgccgccgacgtattacaaacgcacgtgcgtcatgatgatattgccgcgcgcatcggcggcgaagagtttgccctgttgttggtaaatactgatgctgatgatgcgctggtgatagccgagcgaattcgccagatggtcagcgccgggcaggattccctgccggaacgaatgaccattagtatgggtgtctacacggcgacaagctcgctcattgaggctgaagagtgcgttaagcgcgcggataaggctatgtacgcagccaaaaacggtggccgcaatcgcgtggtggtctggcagaaataagagaaagggctctgcaaacgcagagccctgttcatggctagtcttttgcctgaagatcgaggatattgttttcaagtttacggattaagttgagtagcgtttcgacttcctgctttgaaacacccgcaaggatttcatcacgcgttttgccgatcacgtcttccatttggttgatcagcggttcagccttttccgttagcttgatacgtttcgcccggcgatcgtttgcacaagtctggcgagaaataagccctttctcctccagttgatccagcgtgcgcaccaaggaaggctgttcaataccaatagccttggccagctggatttgcgactgctcaggaggtagctgatgaatgttatgcagcgtgacccagtgcgtctgcgttaactccagaggtttcaggcgatggtcgatcagcgcgcgccaaacgcgtaccaaacgtgccagatcagaaccaagtggcgattccaatttcatctccttataattagcttgctaagttattatactgcttttagaatagtgtgcagcatttaaattaccaaaacaaatgaattacttgattcactaaattcaagacaatgatttacaatgtgaactaattcatcaccaagaacattatccctgcaacggcaaaggatttttgcttgtgaaactgagtcttaacactcccggattgtcgctacaggacctggtgttcggcgcttctatctattttcccccgttatttaaagccgtcgtgcttggtttctttatttggctaatagttcatcgtcagttgcgcgactggatgtacgccggcgaaatctggcatcccctgctgatggacctttccctgtttgcgctggccgtttgcctggcgctggttctcctgactctcttgtgatgctcaattcatgaagaaactaaaatatctctcaaccttaattattgccgctattgcgattatcgccgcatggctggtatggaattactacacccagtcaccatggacgcgcgacggcaaaatccgcgccgaacaggtcggcatcacccgcaggtttccggcagtattttgcagttgaatgttaaagacaaccaattggtcaacgcgggggacgtgctcttccgtattgacgatacgccctatcggattgcggttttaaacgctcaggcgcagctggcgaaagccaaagccgaactggctaaagccagggccgagcaaaccaaggctgccagcgatgtcgctcgccgccgccgcctgtcgcaaaacttcatctccgctgaagatatggaaaccgtcaataccgccctgaatactgccaatacgacttatgaggcggctaaagcggtcgttggcgtggcgcaagccgcgctggagcatgcgcagtggcagttgacgcaaaccgtggtcaaagccccggttgatggctggataactaatttgtcaacgcgggtcggggactatgcctccgtcggccatcccgtgtttgctcttgtcgacagccactctttctatgtcctgggttattttgaagagaccaaactacgtcacatccgagaaggtgatagcgctcaggtcgttctctacagcagcaaacaaacgttacagggtcacgtttccagcattggccgcgctatcgtcgaccagagcgtcgaaggcggttcggcgctggtcgctaatattaaacccaatattccgtgggtgcgcctcgcgcaacgtgtaccggtacgtatcgagttcgataaactccctgcagatgtcacattggtttcaggtaccacctgtaccgtgtcaattggcggacaataatgaagctgcaggctttgcgctggcaatcactgccgtggtttaaggccagccgcccgcaatggcgctacgcattgcgcaacggcattgccatgtgtctggcgctcagcatcgcctatgcgttggaccttgatgagccctattgggcgatgacctcagccgcggttgtgagcttcccgaccgtcggcggcgttatcagtaagagctttggccgtatcgccggcagcctgctcggcgcctgcgccgccctgctactggcgggccatacccttaacgacccgtggctattcttattcagtatctcagcctggattgcgctctgtacctgggcctgcgcgatgtttaccaataacgtcgcctacgcttttcagctggcgggctatacctgcgcaatcatcgctttcccggttattaatgttaccgacgcgaatgaactgtggactatcgcccaatcgcgtgtctgcgaagtcattgtcggcatcttatccggcgggttcatgatgatgatcctgcccagtacctcggatggcgtcacgctgctgacggcactgaagaatatgcactcccggttattagagcatgccagcctgctgtgggtgccggaaacaaccgatgcgattcgtagcgcccacgaaagcgtcatcggccagatcctgaccatgaatctgctgcgtatccaggccttctggagccattatcgattcagacggcagaatccattgctgaattatctgctgcaccagcagttgcggatgaccagcgtcatctccagcctgcggcgaatgttattgaactggccggatgcgccaggcaatacgcgagcggtgctcgaaacgctactcagcgagctcgccaatccgcacgcaacggtttatagcgtggcgcggatactggtgccgcttgctcctggccctaacgccgactatcgccacctggcgttctggaaacggctgcgctatttctgtcgtatctatctcgaaagtagccgctggatccgccgcatcgagaacgccagtgctatcacggtgttcaacgtcccctcggcgcctgcactatcgcgtcataccgatcaggcggaagcgctatggaacggtttacgtaccttctgcgcgctggtcgccgtgggtgcctggggcatcagtacccaatggcaggcctgcgccgccgcgctcaccctcgccgccattagctgtgtactctactcgatatcgccttcgccctttaaatcgctcactttattaatgcgtacgctggtactgttgtcgctattcagctttgtggtgaagtttggcttaatggtgcagataaccgacctgtggcagtttttactgtttctcttcccgctgctcaccaccatgcagttattgaaacttcaaatgccgaagctcgcagggctgtgggggcagttaatcgtctttatgggatcgtttatttcggtcaccaaccctccggtttacgactttgcctcgttccttaatgataacctcggtaaaattattggtgtcggtcttgcgtggcttgcctttgcgattatcagccccggctcggatgcgcggaaaagccgccgccatattcgtgcgttacggcgtcacttcgtcgatcagttgagccgccgcccgcagcacagcgagcatgaatttgagtcactggtgtatcaccacattagccagttaagcagcagccaggacgcgctggcgcgacgttggctgctgcgctggggcgtggtgctgctcaactgctcgcatgtcgtgtggcaactacgcgattgggagacacgctccgatccactttcacaggtgcgcgacttgtgtatcagtctgctacgcgacgtcatgagtgaacgcggcgtccagcaacgtccactggcctcgacgttgctggaactgcagcggatatgcgacacccttaaccaccatcatcagccagcggctaaagagctggcggccattatctggcggctatactgctcgctatcgcagttagaacaggcgccgattgccggcaccatcaccgaacggactacttaatcaccccgcaggcaaaacgctcgccgccgccgcccagcggctgcgggctatcggccatattatcgccgccgacatgaaccatcagcgctttgcccttcacttccgcgagcgttttcagacgaggggcaataaccggttggttagccaccccatcatcgttcaccaccagcagaggaagatcgccgagatgccccgcccctaatggcccttcatgcttaccggtatgctgcggatcgaaatgaccgcccgccgcgccggcggcgaccgccttaccgtcttttatcgccggttggcagcttccctcagcgtgaatatgaaaaccatgttttcctggggaagcgcgcgtagatcaggcgtaaactcaaggcctctgtcggtttcagtaattttaacgctaccgacggcctggccaacgctctggctggtgacaagattaagggagacatcttcactggcggcctgagcgccagcgcaaaatgcgagagtgaaaattgcgagtaaacatcgttgcataacacctccggattagctgtatccctgataagtgtaaaccaggtagcggcatccggaggcgtaatcgggcttaagggacgtcgtaacccagcgccgctttacgaatgcggaaccactgctggcgcgtcatatgcagtttttccgccacaatcgccgagcgcacgcgctcgattttccccgagccaataatcggcagcggtttcgatggcaggcgcaacacccacgcgtaaaccacctgttcaatactttctgcgttgagctcctgggcaatttgcgccagctcgtcgcgcagcggctggaagctctcgtcgttgaacaggcgtccgccgccgaggcaggaccaggccatcgggcgaatgcgcaactgctgtagctgatcgagggtgccgtcaagtagcagaggctggtgtatcggcgagagctcgacctggttagtagccagggtgaaaggcaggcgcgattgtaaaagcgtaaactgcgccggcgtaaagttagacaccccaaagtggcgcacttttccactatgatgtagcgccaggaacgcctcagcgacctcgtcggcatccatcagcggatccgggcggtgaatcagcagtaaatcgagatgatcggtcgccaggttgcgcagggattgctcggcgctgagaaggatatggtcacggtcagtaatatagtggccgatggtattttccgcacgcgccttggtagcaataccgcatttgctgacgatttccatacggctacgtagatgcggggcgcgtttaagcgcttcgccaaaggcagattcgcactgataatcgccgtagatatcggcgtggtcgacggtcgtaacccccagatccaggtgctgctcaataaagccaaccaaagcgtcggtggacatcttccagtccatgagacgccagtagcccattacaaaacgtgaaaattccggcccctgcggagccatagcaatacgctgaaccataaacgcttcctcgacaaaaaagtgttctgagtatacgcatatttgtcttcaaaacagtgagggttgctgcggttcttccgccggttcctgcttagtcgcgcgaattttacgcagcagacgctggcggcacagacgcagaacctcctgtttttgcgcgtcgctcagcttttgccagttaaagcgctcatcccggctacgaaaacagccgcggcaatatccgcgttcatcggactgacatattccccgacacggactttgtaccgggaaaaactccagctgctctgccaccaccgttctcctgtattttctctctgtctctcattgaagacgttccgccgccagtgcgcaacttttgttgtcttcgtattcgcgctgacgatcattttgcttgcattagaccaatcggtctactacagtgtactccatgaacagacacagcgaatgcgatacccgagaacacatcctcatcaccggcgagcaactatgcatgcatcgtggttttaccgggatgggcttaagtgaacttctgaaaacggcggaagtgccgaaaggctctttctatcactactttcgctcaaaagaagccttcggcgtcgcgctgcttgaacatcactacaccggctacctgcagcgcctggttgaccacttcgaccatggcgaaggcaactaccgcgaccgactgctggcctactatcagcacacgctgaatcagttttgccaacagggcattatcagcggttgcttaaccgtgaagctgtcggcggaggtgtgcgacctgtcggaagatatgcgtaccgccatggataaaggcgccagccagattatcgccctattgggcgaagcgctggaaaagggccgtttggagggtagcctgttgtttgaggggaagctatcaccctttcacaggtgctgtactcgttatggttgggagccaatttacaggccaaaattacgcgtagcgcaacgccgctggaaagcgctcttgctcacgccaaacaaatcattgcagcgcctgcggtttaacaggcgttttatttaaccagttacaagacgaccggtctactcaggagtcattatgtcagaatctaaattgttcagtccgttaaaagtcggtgcggtgaccgtacctaaccgtgtatttatggctccgctgacccgtctgcgcagcatcgaacctggcgatatccctactccgctgatggctgagtactatcgtcagcgcgccagctccggtctgattatcaccgaagcgacgcaaatttccgcccaggcgaaaggctatgccggcgcgccgggcctgcatagcgcagagcaaatggccgcatggcaaaaaatcaccgctggcgttcatgctgaaaacggtcatatcgccgtgcaactgtggcacaccgggcgtatctcccataacagcctgcagccgggaggcgcggcgccggttgcgccatcggcgctgagcgcaggcacgcgtacttcgctgcgtgatgaaaacggtcatgccattcgcgtcgatacgtcgatgccgcgcgcgctggaaacagacgaaatcccagggatcgtggatgacttccgtcaggcggtaggcaatgcccgcgatgtcggtttcgatctggtagagctgcactccgcgcatggctatctgctgcaccagttcctgtcgccttcttctaaccagcgtaccgaccagtacggcggcagcgttgagaatcgcgcccgtctggtactggaagtggtcgatgccgtcagcaaagagtggagcgccgatcgtatcggcattcgcgtgtcgccaatcggtagtttccagaacgtcgataacggcccgaacgaagaagccgatgcgctttatcttattgagcaactggcaaaacgcggtatcgcttatctgcacatgtcagaaccagactgggccggcggccagccgtacagcgacgaattccgccagaaagttcgcgatcgtttccctggtgcgattatcggcgctggcgcctatacggtggagaaagccaacgatcttatcaataaaggtctgatcgatgccgttgcctttggtcgcgattacatcgccaacccggatctggtagcgcgtctgcagaagaaagctgcgcttaacccgcaacgtccggaaagcttctacggcggcggcgcggaaggttataccgattacccaaccctgtaatccctccattgatagcggcgtaccaacgccgctatactcaagactctgatgtatcaaaacaaactgcataggggaaattatgcgcttacttcacaccatgctgcgcgttggcgacctgcaacgttctattgagttttacaccaacgtgctgggcatgaagctgctgcgtaccagcgaaaaccctgaatataaatactcgctggcttttgtcggctacggcgaagagagcgataccgcggttatcgaactgacctataactggggcgtggatagctacgaactcggtaccgcctatggccatattgcgctgagcgtcgacaacgcggcggaagcctgtgaacgtattcgtcagaacggcggcaatgtcactcgcgaagctggcccggttaaaggcggcagcacggttattgcctttgttgaagatccggacggctacaaaattgagctgatcgaagagaaagatgccggaaaaggtctcggcaactaagctaaatcgggcgcgttcgcgcccgatgttttctcccttcctgctgcaagccgcggcaaaatttgccataatgcgcgctacttttttccagctaagagaatctgatgtccgagaacgctcaacttaatggtctgtgcggccgttttcgcggtttttatcctgtggtaattgatgttgaaaccgccgggtttaatgccaaaaccgacgccctgctggagatcgccgctattacgttgaagatggatgagcagggctggctgatgccggacgaaacgctgcattttcacgtggctcccttcgaaggggccaacctgcagccggaagcgctggctttcaatggaattaacccaaacgatccggagcgcggcgcgataagcgaatacgatgcgctgcacgccatttttaaaatggttcgcaaaggaatgaaagagagcgattgtagccgggcgattatggtggcgcataacgcgactttcgatcatagctttacgatggccgccgccgagcgcgcggggttgaaacgcaacccgttccatcctttcgtgacctttgataccgccgcgctgagcgggttggccttagggcaaacggtattgtctaaagcctgcatcgccgcgggaatggagtttgatggcagcaaggcccattcagcgctgtacgataccgagcaaaccgcccagctattctgcgaaatcgtcaaccgctggaagcgccttggtggctggccgttacctgcgctcgaagcgtaagcgataaaaaaagcgacttccggtgaagtcgctttttcttttgcagcaaagaattactctgctttcggctcgtcagcgttgtgctttgcagccgtttctttgatcagttgctgcagttcgccgcgctgatacatttcgatgatgatgtcgcaaccgccaaccagttcaccgtcaacccacagttgagggaaggtcggccagttagcgtatttcggcagttcagcgcggatatccgggttctgcaggatgtctacataggcaaaacgttcgccacaagcggaaagcgcctgcactgcctgagcggagaaaccgcagctcggcagcttcggagagcctttcatgtacagcaggatcgggttttcagcgatttgacgttggatcgtttctaaagtggtgctcattgtcgtgcttccttaaacatctttacggcagtaatttgtcattgtagcgtcctggacgcaggaccgataataacatttttttcactcgccacattttatcttctgtcgtctgaagttgccttaaaaatatcactttgtgacgtcagcgtggagcgaattgcgcattttctgtacgaggcggcgattgtctgacttatttttttgcaatcgttaaccaaacgacattttagatacaaaagagtattaactttctggctttttatgctttagaatcattccggtttgtcattcaccgtcaggcattagtatatgtctgtaatttaatcagggattgctcagtggcgcggctcaataaaatcgcgatatcgctctgtgcattactgtttacatctatctcgcttacgccattggcgcatgcttcagggcatacgcacgcttcggctacgccgaaggcgcacccggcgaaaggctccaccgccgagcgtaagaagaaagcgacgcagaataaatccaaatccaccgctaaaactacccgtaaaaaaacctcaagcgctaagcaccctacccgtactaccgcagcaagccaaaccgcgcttaatcgtcaagccgccggcgccaccaaaaaatgcgtgttgcgcaaaggttataaaaagcagtgtgcgaaaacggtaaaatccagcgaagcatcgacgctggcgttgaacagcgtgaaaagcaaatgcgtggtgcgtaaaggctacaaaaaacgttgtaaacctgtcgccgacgaaccaaatctgacgattgccgacgcgcacaaagcccgcgtgcaaaaagcgcaaaccaccgcaatgaataaactcatgggtcagctaggcaagccctatcgctggggaggctcttctccgcgcaccggttttgactgcagcgggctcgtttattatgcctataaagatctggtaaaaattcatattccgcgcaccgcaaacgaaatgtaccatttgcgcgatgcccgcccggttgatcgcgatgaactgcaaagcggcgacctggtcttcttccgcacccgcggacgcggcaccgccgaccacgtaggcgtttatgttggaaacggtaagtttatccagtccccgcgtaccggccgtgatattcagataacctccttaagcgaagattattgggttcgccactacgtcggcgcgcgccgcgtgatgacgccaaaaaccattcgttaagagacgctggccccggtttgccgctgcggcggcaaaccgctcttctgtacattctcccctcttccagattcagcggatactgcattcgctcctccagttgcgcgggtgacggcgataactggtcggcgacataccaaaatgacgacggaaagtacggcagaaagttgcctggccttcaaacccgagcagcaatgagatactcaacgccgaatcctgcgtctgtttgagaatgccggcggcaatggtcattttgcgtcggctaacatacgttcccagcgtataaccggtaatcatcgcgaactgacgctgaaagtaccagtgtgaataacccgattttctcgagatcgcggtaacggggagcgcggtaaaaatgttgtcttcgatccactcgataatatctatgacgatcgggataatatgtccgctgaccatttcatgtttgtgcgccatctcttttcatccatcaataatgagctttatgcttgttcaataacgatttcttactccgaggttcgttgcctgcagaggtaattatatttgtcatacaattaaaattaatcccaatgattattgggcatgaaagtcattcccgttgcgcatagtgctcacaaactaatgatttatagcgatctaaaaagataacaagtggtgaagatgcgacgcgttttagtcgtatgcaggagcgtcgatggggattttgcgaaccaactactcgccatccgatagactggcgaaggcttaatcagtcgcgtcaggaatgaataacctttgttgttgtaagtcttttaactgacttcagcaaatgttaacattctcaacacaataacatgtcacactcgcgacagcgatgtacagacaatgctgtattcaggtgagccctcacctaattaatgtgagaaaaaacaaaaagttataaggagagtagcaatgtcgttcgaattacctgcattaccatatgcaaaagacgccctcgcgccgcacatttccgcagaaaccctggaataccattacggtaagcatcaccaggcctacgtgaccaacctcaacaacctgatcaaaggcaccgcttttgaaggcaaatctctggaagagatcgttcgctcttctgaaggcagcgtcttcaataacgcagcgcaggtctggaaccacactttctactggaactgcctggcgccgaacgccggcggtgagccggaaggcgaactggccgcagcgattagcaaatctttcggtagcttcgctgactttaaagcgaaattcaccgatgctgcggcaaaaaacttcggcgcaggctggacctggcttgttaaaaacgcagacggcagcctggctatcgtctccaccagcaacgccggcactccgctaactaccgatgcgacgccgctgctgaccgttgatgtctgggaacacgcctattacatcgactaccgcaatgcccgtccaaattatctggaacacttctgggcgctggtaaactggaaatttgttgccgctaacctggcagcataaaaacaaaaccgcagcaggcttaccccgctgcggtttttttcttagtgcagcttagttattcgctaacgcctcttctggctgagaacgcccgccaaataacaccaccgctaatgccagcccggcaataatcgcacccatcaccggcacaaaagcataaccgagaccgccggatatcaccgcgccgcccgccgccgcgcccaacgcgttaccgaggttgaaagcgccaatgttcaccgacgatgacaaacccggcgcttcgtgcgccacgcgcataacgcgcatctgcagcggtggaaccaccgcgaaggttgccgcgccccatacgaccatgctgacagcagcacccagttgcgattgcgccagcagcggaatggccaacatgatggcaatcaataacaacaggaacccttttaacgttcccgatactgagcggtcggcaaacttaccgcccagatagttgccaagcgagaaaccgacgccgattaacaccagcatggcggtaacaaacagcggtgaagcgtgggtgatggtatgcagtaccggagaaatataggtatatagcgtgaacatcgccccggcgcccagcacggtagtcaacagcgcagagagtacctgaggacgcattaataccgacagctcgcgcttcacgttcggacgctcgccggcgctacctttcggcagggagaaccacaggcttaccatcgcaattaacccagacccgccgtggcgaggaacgacattcgccagccgatggtttccccaagccaggtggcagccggtacgccgccgatattggcaatggtaagccccataaacatggtcgcgaccgcgctggcctgtttgtgttttggcaccacgcttgcggcgacgaccgagccaaggccgaagaacgcgccatgattgaggctagtgataatgcgcgacagcagtagcgtcgtgtaatccggcgcaatagaagagagcacgttgccgagggtgaagatccccatcaggaagatcaatgcattgcggcgagcacgatgcgatagcagtaaagtcattaacggcgcgccgaccatcacgccaatggcgtaggcgctaatcagcatccccgcggccgggatagacacatctacgcctttggcgataaccggcagtaatcccattggggaaaactccgtggtaccgataccaaaggcaccgatcgccaacgcgagtaagggaaagttgattttcattcagagactccatcaggccgattcaggacacggcattacatcagaagccaaaagcatgacatcaatcacagaaaaacagaagtaaacgaaatgacaaaagatttttgcagatttgctaataatggcgggatgggaggggaagcccctccctgctggaatcagtgcaggaccgcggtcaaggcggcggcaacgatcagaccaagaacaataatcgtcgtggtcagcgaaaactttaaatttgtgtccatcaattttctcccctgattatccccacatagaaagtgagcttgctcatttttgcacaaaaatatgcaaaaatcttcccggatttagagtgatgcacatttttgctcttcccctttgccgcgagataggacaaaatcccacgctaatttgaaagcgtatcggccattgaccccttcctgtcgttctgtgtcgttttcccaggtgttgcaatgttgagcattgtatacagggtgtgtataggcaaacgtttacgtatcgataatcagacgatcaggtcaaggtctggagtgagaagtaatggcaactattaaagatgtagcgaaacgcgcaaacgtttccactacaactgtatcacatgtgattaacaaaacccgtttcgtggcggaagagacgcgcaatgcggtgtgggcggcgattaaagaactccactattcgccaagcgccgtggctcgaagcctgaaagtcaatcacactaaatcgatcggtttgctggccaccagcagcgaagcggcctatttcgctgaaattatcgaatccgtagaaaaaagctgcttccagaaaggctataccctgattctgggcaacgcctggaacgatccggaaaaacagcgcgcctacttgtctatgatggcgcaaaagcgcgttgacggcctgctggtgatgtgttccgagtacccggagtccgtgctcagcatgctggaagagtaccgtcatattccgatggtggtgatggactggggcgaagccaaagcggactttaccgactcggttattgataatgcctttgaaggcggctatatcgccggccgttacctgattgaacgcggccatcgtgaaattggcgttattccgggcccgcttgagcgtaacaccggtgccggacgtctggctggcttcatgcaggcgatgaaagaagcgcatatcaatgtgccggaaaactggattgttcagggcgactttgaaccggaatccggctaccgcgccatgcagcagatccttaatcagcagcatcgcccaaccgccgtgttctgcggcggggacatcatggcgatgggcgctatctgcgccgccgacgaaatgggcctgcgcgtgccgcaggacatttcgctgatcgggtatgataacgtgcgcaacgctcgctatttcagcccggcgctgaccacgatacatcaaccaaaggactcgctcggggaagcggcattcaatatgctgctcgatcgcattgttaataagcgtgaagagtcgcagtccatcgaggtgcatccgcgtcttatcgagcgccgctcggttgccgacggcccgtttgtcgattatcgccgctaacgccctcctccggcgccggttattccggcgcccgcaaccactcccgattcaacgtttcgctgtcgccaagatagtcaagcagccagcttaaagcgggtgaagcatcgctttgttgccaggtcagacagcaggcggcatccgggaatgggttttccagcgtcaaggccgtccactccccgctgtcgatatgcgggcgggcaaagtggcctggcaccatcccgacgcacaatcctgccgaaagacaggtggctgaagattcccaatccggcaccaccacccgcttctggttatccagcagccaggttgtgcgcttcggcaacgaacgtgaggtatcttcgcgcaccagggacggccagttgcgcaacacgtcatcgctgagcggcccttccatctgcgccagcggatggctactggcaacgacacagtgccagttcagcatccccatatcgcggaaagcgtagcgccctcccaccggtatcgaacgcgtcgcgccgatagctaattctacccgcccgtcggctaacgcatcccagacgccgttgaaaacttcctgaaaaacgatcagttcgacatcgctaaaatggcgataaaaatcaacgatcatctggcgcatccgcgccggtttaacgatatcgtccaccgcaatcgacagttggccgcgccagccgttagcaatctgctggcactgctggcgggtgatctgcatttttttgataacagaacgcccttcctgcaaaaaccagtgcccggcgggggtcaattcaacatcacgatggcgacgttcaaaaagcgggaccgcaagccactcctccagttgtcgcaccgtatagctcaccgccgaaggtacgcggtgcaactcctgcgctgcggcgctgaaactcccgttacgcgctacagcatcaaccacttctaaggaatattcagaccacatattctgcctgcaaaatttttgaatgcatgtgacaaataatagcgtttcacaaggtggattacactccctacactctgcggcatcgtacctgcatcagtagaaagagaacgttatgcaacaacctgggaaaggatttttagtgtggctgggcggcctgagcgtgcttggttttctggccaccgacatgtatctaccggcctttgccgccattcagcaagacctcaacgcctctgccgcatcggttagcgcgagcctgagcttattcctcgcgggcttcgcgctcggccagctgttctggggccgctgtcggaccgctatggccggaagccgattctgctcaccgggctggctatcttcgctgttggctgccttgggatgctgtgggtacgcgacgcgacgctgatgctggtactgcgttttgtccaggcgatcggcgtatgcgccgccgcggtgacctggcaggcgatggtgaccgactactatccggcccagcgcaccaaccgcattttcgcgacgatcatgccgctggtcgggctctctccggcgctggcgccgttactcggcagctggttattagtccacctggaatggcaggctatcttcgccaccctgttcgctatcaccttactgttgatgctgccggcttttcgtctgaaggcggtcgtcaaacctgctggcgaaacccagcagaaacttacctttatggccctgctgcgttcacgtgaatatagcggtaacgtgctcatttatgcggcgtgttccgccagcttcttcgcctggctcaccggttcgccgtttatcctccatgaaatgggctatggtccgacggtgattggtcttagctacgtgccgcaaactatcgccttcctgatcggcggttacggctgccgcgcggcgctgcaaaaatggcagggtcatcagatgcttccctggctgctggttgtttttgcgctgagcgtggctgcgacctggcttgccgggatacaggatcatccgtcgctggttgcgctaatggttccgttttgcatcatggcgattgtgaatggcggcatttaccctatcgttgtcgcccaggcgctgaaaccttttccacaggcgaccggccgcgccgccgccctgcagaatacgctgcagcttggcctctgcttcctggcaagcctgctggtctcaagccttatcgccactccgcttctgaccaccaccagcgtgatgctgatttccatcgtcctggcaggcatcggtttctggatgcagcaacgacgcgtacagttagtgagcgaatcgtctcacgcttgatgaattcttaaaggatatcccggaccagtcattagcctgctaatatatttttattgaaaggcggtttttagcggcctatactggatccggcatcacataaatagaaagttttttagatattaacgggggcaggaagcagcccgttttaccatggaaggcctttcggcaagggttatctcccttcctctgttctacgtcggatagcaccctcacgattttttcgtgagatttctcacaaagccaaaaagcgtctacgctgttttaaggttctgatcacttgggcgtgatggagaagctatgagttcatcgtgtatagaagaagtaagtgtaccaaacgatgattggtaccggattgcagctgaattattgggccgtgccggaattgagatcaatggttccgcaccctccgatatccgggtaaaaaacccgctcttttttaaacgcgtgttacaggaagggtctctcggattaggcgaaagctatatggacggctggtgggaatgcgaacgcctggatatattctttcacaaggtattgcgcgccgggctggataagcaactcccccaccacttcaaagatacgctacgtatcgctggcgctcgcctgttcaatctgcaaagcaaaaaacgcgcctggattgttggtaaagaacactacgatttaggcaacgaccttttccaccgcatgctcgatccctatatgcaatattcctgcggatactggaaagaggccgaaactctggaacaggcgcagcaggataaattagatcttatttgtcgcaaactgcagcttgaaccgggaatgaaagtgctggatatcggttgcggttggggcggactggcctattacatggccaaaaactataacgtcagtgtgacgggcgtgactatttcggccgaacaacaaaaaatggcgcaggagcgctgtgcaggattagatgtcaatattctgctgcaggactatcgcgatctccacgaaagttttgaccgtatcgtctccgtcgggatgttcgagcacgttgggcctaaaaattacgccacttattttgaagttgtcgatcgtaatttaaaaccaaacggtcgttttctgctacacaccattggttcaaagattaccgatcacaacgtcgacccgtggattaataaatatatattccctaacggttgcctgccatcggtacgccatatcgccgatgccagcgagaagcattttgtgatggaagattggcataactttggtgccgattatgacaccaccttgatggcctggtacgaacgtttccttgccagttggccggatattgccgataactattcagaccgtttcaaacgcatgtttacctattatctgaatgcctgcgcgggtgctttccgcgcccgcgatattcagctctggcaggtcgtcttctcgcgcggtgttgaacatggcctgcgcgtagcccgctagactcgctaaaaaaagcccccgcagaaatacgcttctacggggcttttttattattcttccgcgcttttttgcgccgcttcttttgccgccagtacgcgttccacggtatccacgaccgcctgagtctgcggatcgatttcgatattcactttatcgccgagttttttcaccccaagcgtcgtgcgctgcagcgtttcggggatcagatgcacacagaaacgagtcggggtcacttcgccaaccgtcaggctaataccgtccacgccaatgaaccctttatacaggatatatttcatcagcgccgggtcctgcaccttaaaccaaatctggcgattattttcagatgtcaggattttaacgacttcggctgtagtcataatatggccagacatcaaatgaccgccgatttcatcactgaatttcgccgctcgctctacgttgaccaggtcaccttcatggatagcgccaagattggtgatacgcagcgtctctttcatcaaatcaaagctgattcgcgggccgtcaatttcggtaacggtcaggcaacagccattgtgcgccaccgaagcaccggtctccaggccgtcgagcatatgcgccggcaactccaccacatgggtgcggaaattcggtttctcatcgatggacaccactttcgcagtcccctgtacaataccagtaaacatactttgctcctgttgagaatcgtgacggtatcattaccgttatatatacgcggaacaataacagttgaccaaacaggttgccagcgcgcatcgtgcccccaccattttttcactggcttaatggctaatcctcgctacaatagactggaaattcctcctgttttttcttcttgctgccatttaaggcggcttttttagtctcaaaataacaacaatataaaggtgttcacgtgcagaagtactttatagaagcgcgtcagttattagcattggctatcccggtcattctggcgcaggtcgcccagacggcgatgggttttgtcgatacggtgatggccggcggctatagcgcaaccgatatggccgccgtggctatcggcacctcgatctggctacctgctatcctgtttggccacggtctgctgctggcgttaacgccggttatcgcccaactcaatggctccggtcgccgcgatcgtatcgcccagcaggtacgccagggcttttggctggcgggctttgtctccgtactggtgatggtggtgctgtggaacgcaggctatatcatcagctcgatgcacaacatcgacccacagcttgccgacaaagcggtggggtatctgcgtgcgctgctatggggcgcgccaggctatctgttcttccaggtcgcgcgtaaccaatgcgaagggctggcaaaaactaagcccggaatggtgatgggttttatcggcctgctggtcaacattccagtgaactacatttttatctatggtcatttcggtatgccggaacttggcggcatcggctgcggcgtggcgaccgcctcggtctactgggtcatgtttgccagcatgctgacctgggtgcgccgcgcgcgctcaatgcgcgatatccgctgcgctgagcgtttcagtaaacctgatttttcggtattaaaacggctggtacagctggggttgccaatcgcgctggcgctgttttttgaagtcacgctgttcgcggttgtggcgctgctggtttcgccattggggattatcgatgtcgcagggcatcaaatcgcccttaacttcagttcgctgatgttcgttcttccgctctcgctggcggcggcggtaacaatccgcgttggctttcgtctcggccagggctcgacgctggatgcccagacctccgcgcgtaccggggtcggcgtgggcgtctgcatggcaatgatcaccgcgattttcacgatcctgatgcgtaagcagattgccctgctgtataacgataaccctgaggtggtgctactggcctcacagctgatgctgctggcggcgatttatcagatttccgactccattcaggtgatcggcagcggtattctgcgcggttataaagatacgcggtcgatcttctttattaccttcaccgcttactgggtactgggcctgccaagcggttatctgctggcgctgacggatattgtggtgccgcggatggggcctgcgggcttctggtgcggatttatcatcggcctgacctccgctgccatcatgatgatgctgcgcatgcgcttcctgcagcgtcagccgtcaagcgtgatcctgcagcgcgccgcgcgctaaccagaaacaccacagaaaagggcaagccgttaaaacggtttgccctttaatagcgctacttcgcaagccatttgcgctgcggtggcgtatagcgatggaatgcggttaaaatctcctgtacatcatcgctaaaagtcagcatctcagcatagcggctgtgcataaacccttctgcggccattttttccgccatcgcctgcagcggattgtaatagccgttcacgttcaggaaagcacagggcttttcatgaataccgagctgcgcccaggtccactgttcaaaaatctcctccagcgttccggctccacccggcatagcaatgaagccgtccgccagcagcgacattttgtttttgcgctcatgcatattctcaacgacatgcagctcgcttaatccgctatgcgcaatctcacgctccaccagcccgcgcggcatcacgccaatgacccgcccgccgtgttctaatgctgcatctgccacggcacccatgagtcctactttaccgccgccatacacgagctccaccccggcttgcgccagcgcctttccaacctgttgcgcgtaaacctgataaatcgggttttccccggtagaagaaccacaaaaaatgccaattgctttcattactgcgctccgtcgtttatttgccacacactctagcataaagtcggtgagcgtctcccctgccaatccgggcagaaaaacgcaacggagcaggacattgttgaagaaatatcctttatcatcagtaaaatatgggcgatatggataaaagttctgcaaacgcgtctattctgcaagaaaagtgacgtttgcctcttgccacacggcctccctgccgttaatatgcgtccccgttgtcaccacaacattgcgttcatagctcagttggttagagcaccaccttgacatggtgggggtcgttggttcgagtccaattgaacgcaccattcgcgtttatagctcagttggttagagcaccaccttgacatggtgggggtcgttggttcgagtccaattaaacgcaccatatgcgtccgtagctcagttggttagagcaccaccttgacatggtgggggtcggtggttcgagtccactcggacgcaccatttcaatcattattgatttggtgcgcacttctcttctttcctcttgcttttatctataacgacatcagtcgctgtacctgaatactctccagtttcccctccagaatcgccagaaaatcgtcatgatacggcatcgcaacgtgctgttttagatcgtcttccgagcgccaacgctcaataaacacaaatgagatctttccttgccgggaaagctgcctgacatcagggatctcccggctttcgtgcaggtcatattgcaggcacccggcttctctgtgcgtcggcggcaccatggctaatgccgcatttctgatggtatcgatatattcaggatgggggtcagcgtggcaacaattttgacttcactcataaggcttcctctggctcaccgcgtttccctggagcctatctctgtccagggcgtgaattattcagcgtagtggtgaagccagcattacgccagagtccgcgtcagcgccctttctcatacaccgtcatggtaaagacgacgggtaactcgctaacattacaatattcatgtggcgcatcggtacgtgctaccgcagaacacccttcagccacctgatatggctcattattcacgataagggttagctcccctcggtcacatacagcagctcgtaagtgtcggtcggatgccccggcgaacggaacgattcgcctggcagcatccgccactgccagagctcaagcatatccgggccgctggtgccggccaacagtctggcgctaccgccctgttcgccgcgccataataccggaatcgcgtcacggtcgataagatgaaccatcggctcactggcgacgttaacaaactccgccaccgacacccccatcgccgcagcaattttgcacaacatcgcgatactgggattcgcgcgacacccctctatatccaccagcatccccttactgacgccggcgcggcgggaaagctcgtcaagagagatcttcttttcccgtcgaaactgcttaatacgccgcgataccgcctcgttaatgcggctcagatcgttgccgttatcggtcgttatattgactttatcattcatcggtcgatattatgctctaaatcagtcgttacaggattatgcaatgtctcacccattaccgtcaattagcccacagttagccgcaatcgccccggggtttcgggcgctgagtattaccgtcaacgctgcgccgctacgtgatccttccatcggtgaagccgcgctggcgacagcctgtcaggcagtattagccggagagcccgcatgggcggaggaccatctcgcggcatggtctacggtattcaaagcgtttggcgctaaaccgaaacgcacgccctgctccgcagaggcattgcgcaaacgcgtacttcgcgatggcgccatgccggcaattgacccggtcgttgacctctacaatgccgtcagtctgcggtatgccattcccgttggtggtgagaacatcgccgcctattgcggcgcgccccgtctggtcatcgccgacggctctgagccctttgatacaatgaaggaaggcttagccgccgtagaatcaccggaaccgggagaagtcatttggcgtgacgatcgcggtgttacctgccgccgctggaactggcgacagggagttcgtacccgcctgagcgctcgcgatcgacagatgtggttcattctggaaagcctgccagagatgccgctcgaagcgctgtatgaggccggccggatgcttaccgggggctggagctgatgatgcccggtctgagccaccagtccacgctaatcagcttgtaaagacagagacaggagcaggtaatgtcactatttttaaccagttttatctttaagaagaaagagtacgacgacgacttctatcaactggacggcgagatcgagcgctatacccagtcgctggagggatttatcggtatggaaagctatcatgatgccgccagcagccgaatcatcaataactactactggcgtgaccgacagtctatggaaatgatgatgaaccatctgcaacaccaacaggccaaagcgcaggggcaacgctggatcgccggttatcaaaccatcgttgccgagattgagggcagccataatatgaacctgccccatccacttgcggagtatccactacgctaccaaccgaaacatcagtgattttgaacaagattggcaaattgtttcgattttaaacattcatcattggtcctattcttatcacatcggagcaacaatgctcctttccaaacaaaatatttaaggaatatgaccatgaaatccatcaaaacttttgctgctgttaccgttctgtccctgatgtcattcggtgctttcgcgcagagcgtgacggcaaccgcttcaaccctcgaccgtgcggaagcgaaaatcgccgcccaggctgcggagcaaggcgcgtcttataaaatcaccagcgcccagttcaataaccgcgtctatatgactgccgaactgagcaaataagcctgcaagtgtgacgcgccaggctttacctctggcgcgccgcgctgcttttcagcgaagacaattttgtttctccagcgatacttcaactgccgtgccagcggagaccgctaccgtcaaaggcgtgtgccatcctgctgcttctcaataatcacttgctccagcatcgccgaggccttttccgctatcccgccgctgacttttgtcgccagcacgtcaataaatccacgcagctgctgcgccgtcaggccgttgtgcaggctaatcgcgtaatggctctttagctggctttccacgccggacagtgcggccagcattgagatcgtcgccagctcgcgcgtcgaccaatccaggacgtcacgctggaaaatatcgccaaacagatgcgccttcagataacagtcgatagctggcgcaaaatcaaatagcggcccgctgaccgtttgtccgaccagttgtgtctgattacggctaccggcctgcaggctatcccagttctccggtaacggggtcgctgtcgccccttcgttatcaataacgcctcgcgcctgacgctcggttatcaccttcatcaggcaggagagcgcattcaggctacgcggaaagccgcagtaggcatacaactgcaccagcgtctcttttaattcatttattgtcaggccggtatcaagcgcggtatccagcgccgcggccagcgccgcgatattgccttcagcggccagggcggcaaccgggatcagcgcctgttggcgcgagttcaatgggttttgcatcgtttgttctccaaacggaaagtatcgacaggagaagaagattatagaaagttggcagggggttgattagccaggcaaaaacgaacagacctatgagatgggctcatgaattatctattacgatgcacagggcttccttgccctgggaggatattattcgaagtagacttccgggttttccgacagtgaaacgaaggttttggtgtctttatccagcgcgcgaatatcgccgctttcaatatcatagaaccagccgtgcagacgcagggttttgtcacgcagtccgaccgcgaccgatggatgcgttttaatgttgttcaactgggcaatgacgttttcctgcaccataccgttcactttatcggtttcgctggcccaggttttcttctcaaccaccgctttcgccgcgtccgaataacgcaaccagtgcgaaacggcaggcattggttccagacattggcaggtggcgatggctttcatcgcgccgcagttggagtgaccgcagataacgatatccgtcacgccaagggcgacaaccgcatattcaatggtggcagacacgccgcccggctccggcccgaaagagggcacgatgttgccggcatttcgaataacgaacagctgcccaggttcctgctgggtaaccagttccggaaccaggcggctatcggaacaagagatgaacaacgctttaggattctggctcgacgccaggctgcggaagagctctttgcgttgcgggaaaatctctttctggaagttgaggaagccctcaatgatatgttgcatagcagtgtctcttttctctgtagtaattacgatatgacaaagatcacatttagctagtgtatcaccgaagcgcagaatgggaatcgtaattgataatagctgcgcaataagcacccaacctgtcctttgggtgcttgcctctgatggtctacataaagaacttcaccgcttgttgcaaggtggtgcccatccccacagcaagggtataccgacggccagccagcttagcgtcagcagcagcggcgcgggcttcggctcccagctcagctgcgcatctttattgatagtatacaggcccttcgcctgctgctgttgctccgcggtcatggcatatttctgtggaatcggccgaaccagctgattacaaataaagccgatgataagcaacccggtcaacgccagcagcgtgatgtcataaattctcgcgggttccactccctgcgccagctggtactcgcgcaaatagttgaccagcaccgggccgctgataccggccgccgaccaggcagtcagcagacgaccatggatcgcgccaaccatttgtgaaccaaatacatcggcaagatatgccgggatggtcgcgaaaccgccgccgtacatggagataatcacgcagagcgcacagacaaaaaacgccacgtagccgccgtgattaatcagcggcaacgtgccgtaaagcagggttcccagaaagaagatcagcgcgaaggtgaccttcctgccgcacatatcggaaacagaagcccagaaaaagcgccccagaatattaaacaggctgagcaggccggtaaatcccgccgccattgtcgcgatgcgcttcagctgttctgcattgagttcctgccagcccagatccagggatagtagctttccggcaaaaatctcctgcagcatcggtgaagccatgccgagaatgccaatcccggcggtaacgttgagccatagcaccagccacagcagccagaactgcggggtgcgccaagcgacgctaacgtgaacctgaacggtcggctgtttgctgatggcttgctgcgccttcacgccgaccggatgccagcccataggcggcaaacggtaaccaaaagtgccgcagagcatgaacagcgcatatatcaccgccagcgccagaatgctctgccataccccactttcctgaccatcggcgaaaaaattgatcagccaattcgccagcggcgctcccaccagcgccccgccgccgaagcccatgatcgccattcccgcggccatccctcgcttatcggggaaccagcgtaatagcgttgagaccggcgagatatagccaagccccaggccaatgccgccaatcacgccagcacccaaccacagtagccacagctgatgaaaatagattgccacggtcgccagcaacaggccgccgcaccagcagagggttgcaacgaaactcaccagccgcgggccaaccttctccagccagctcccccaaagcgccgcggagcagccgagaaaaacgaagaacagcgtataggtccagccgagcaaggaaattttccagtcgcactggcgggtaaccagttgctgccagaacgacatatcgaccggacactgcagcggcgcgctgccaccaatcagctgcgacattggcagccagtaaacggaaaagccgtaggccatgccaatgcacaaatgcaccgccagcgccgcgggagggaccaaccagcggttaaatccaggtttagcaataatgcgggcttagcaaaaaaacgactcaacgatgaaacgggcggagtcgcgagattctcatttatctgcaccatgttcctgtccttatcatgtttgtttgtcggctaccgcagcagccgatggcaaacggtaaaggcaagaacaatgccacctgctgaaaaaacgaacagaaaatggtgactgaagcgagcaagcagaacagataagcaatgagggggagttgaaagctgtaaaaaaagagaaaatcatcggtagtgattttctcttttccggacatcggggtgttttcgttgccagatccataacgatcggcgattttgataaaagttgctctcagagtgatacggcttatcagaccccgaccagttcatactttttaattttacgatatagcgtcgcaatcccgatcccgagctcatcggctgcctgctttttattgctatagcgcgtcagcgcatcgcggatcatctgcttttccatctcctccagcgccgttccccctcttcctctttcgcaacgctagctggcgcagcccgggtgctttcccgttcggtgactttgccgctgctgataaggttcggcggcagcagcgacagatcaatcacctcgccggagggaaccacgttaaccagatactccatcaagttactcagttcgcgaatattgcctggccagcggtagttcttcagtaaggcgatgacttccggggatacgcctggatagaccagctccagccgacgggtgtgcagatgcaggaaatagtgaatcagcagttcgatatcatcctgacgctcgcgcagcggcggcaggcgcagtgggatgacattaagacgatagaacagatcctcgcggaatttcccttcggcaatgaactgctcaaggttctggttagtggccgaaataatgcggatatcgaccggcaccggatggctggcgcccaccggctgaatttcgcgtgattcaatcgcccgcaacagcttagcctgcagggttaacggcatatcgccaatttcatcaagaaacagcgtgccgtgattagccgcctgaatcagaccggtcttgccgttcgccgacgccccggtaaatgcgcctttgacataaccaaagagctcgctttccagtagctgttcgggatagccgcgcagttgatcgcgataaaaggcttagcctgacggtcgctgagcttatgaaccgcgcgagcgaccacctctttgccggttccactttcgccgacaatcatcacgctcgacgggcttggcgcaacacgggtaatcagttttttcagctgacgcattggccgacattcgccaaccatctgttcaatctgcggtccatcctgcgatggcgccagatcggccgacgaatgcgactggtggaaggccattaagaacagccattgatcctgaatagcgtgcagctgaccgataataagctctttcttatcatcaaaagaaatgacgtgctgtacgtgaccgcgaataaagttttgcgcaaaagtcagcggacgaaaatgaatagttttgccaatcatactgccgtgattcgcgccaaggattttcatcgccgcctgattggcaaattttactttttgatcctggctaaccaccagcacgccctgatccatgttttcaatcatggtggaaaacatttttagcatattatctcccccaccctggtcctctaacaggcgggagacaaatattgaagaaacgtgtcgtacataatctgagaactcgtggaggttgtcattaatgcgctcctgctgctcgcgagttaaggcgaccaggctaataacccctacacactgttcctgataaatcaccggggtacccagaaatgccttctctttacagttctctttattggtacagtctttacacaagggatcaaaacgcgaatgagttacgaccttttcttttttgtttctattatgtaacgtaaaagtcgcgaatctgtatttaattttcgccccaggaatttaccgtaggcgccggtaccggcgacccggcacagcgtattgtcgacaatctccacctcgagttgtaacacactggagagcatgcgggcaaaacgttgaatcgttggctgaatctgcattaaaacggatagcgaattggagggaatcataattgaccttttaatatcagtagccgaaagaaaatgctgaagatcgactctttttattctgcgtttatcatactaccgccgcccaggctgaaaaaaggtgccaaccctgcgcttttttacagcttaaagaaaatatggaagaggtatcacattttcctctcaatatgataatccgcagggcaaaattatcattttggtgttgaaaacaccatcgcagatcgatatccacacttgtctgacggctcaaattaaatttaccgtgacaactggcaaatgaatttcatttccatcagttgagcggtataagccatttttcgtgacccgcctcgcataatttccgattttcccgctcgcccaccgcgactcaattataactggcacgcttattgttagtggtaatacagcgctggccgtcgccacttacatcaatgtcatttcgactgcacagcaatcaataagccgtcattcactaccaggatcgaaatatgaaaactgttaacgaactgatcaaggatatcaataagctcaactctaacctgcatgaaaaagatttcctgctgacgtgggagcaatcgccggacgagctgaagcaggtgctggatgtcgccgcggcgctgaaaacgttgcgggcggaaaacatcgcgaccaaagtttttaacagcggactgggtatttcggtctttcgcgataactctacccgcacccgcttctcttatgcctcggcgttaaacctgctcggcctggcgcagcaggacctcgacgagggcaagtcgcagatagcccacggtgaaacggtgcgcgaaaccgccaatatgatctccttctgcgcagacgctatcggtatccgcgacgatatgtacctcggcgccggcaacgcctatatgcgtgaagtcggtgaagcgctggatgacggccacaaacagggcgtactgccgcagcgcccggcattaattaacctgcagtgcgacattgaccatccgacgcaggcgatggcagatctggcctggctgcgtgagcacttcggctcgctggaaaatctgaaaggtaaaaaaattgccatgacctgggcctactcgccaagttacggcaaaccgctttccgtcccgcagggaatcatcggcctgatgacccgcttcggtatggacgtcaccctcgcccatccagagggctacgatctgatcccggacgttatcgaagtggcgaagaaaaacgccgcggcttccggcggcagcttccgccaggtcaccgatatggcggaagcctttaaagacgccgatattgtctacccgaaatcctgggcgccatacaaagtgatggaacaacgcacagaactactgcgcgccaacgaccatgacgggctgaaagcgctggaaaaagcctgtctcgcccagaacgccaatcacaaagactggcactgtaccgaagagatgatgaagcacaccaaagacggtgacgcgctgtatatgcactgcctgccggcggatattaccggcgtctcctgcgaggagggcgaagtcaccgaagcggtgttcgagaaatatcgtatcgccacctataaagaggccagctggaagccgtacatcatcgccgccatgatcctctgtcgcaaatatgccaaacccggtcagttgctggagcaactgctgcaggacgcgcaaaaacgcatcaaataacttcgcgagccggtctgcgggccggcttccccgactccaaagaaggataaggacagaatatgtctgctttttcgctgaaaatggatattgccgacaaccgtttctttaccggtgaaacctcgccgctgttctctcgtcagcaggcgcaacaggcgcgccattttcatcaaaaaatcgccggttaccaaccgacgccgctgtatgccctgaaggaactggcgacgctgttcggcgtaaagaacatcctggtaaaagatgaatcccagcgctttggcctcaacgccttcaaaatgcttggcggcgcctacgccatcgcccaactattgtgtgaaaaataccatctcgatattaacgccttctcgtttgagaccctcaaatccaccatcaaagagaagatgactttcgccactaccaccgacggcaaccacgggcgcggcgtcgcctgggccgcccagcagcttgggcaaaacgcggtggtgtacatgccgaaaggttcagcgcaggaacgcgtggatgccattttgcgcctcggcgcggaatgtatcgttaccgatatgaactacgacgataccgtgcgctttaccatgcaaaccgcgcagaaaaacggctgggaagtggtacaggacaccgcatgggaaggctacaccaaaattccgacctggattatgcaaggttacgccaccctcgccgatgaagcggtagaacagatggcggcgatgggcattgctcgccccacccacgtcttcctgcaggccggtgtcggcgcgatggcaggcggcgtgctcggttatctggtcgacgttttcggcgcccgcgatttgcactcggtgatcgtggagcctgaactggcagactgcatctatcgctccggggtaaaaggcgacatcgtcaacgtcggcggcgacatggccaccatcatggcaggactggcctgcggcgaacctaacccgctgggctgggaaattctgcgcaactgcgccacccaatttatctcctgccaggatgccgttgccgccctcggtatgcgcgtactcggtaatcctgtcggcaaagaccaccgggttatctccggtgaatccggcgccgtcgggctcgggacgctggccgccgtccacttccatccgcagcgccaggcgctgatgaacaaactggggcttgatagccactccgtggtgctggtcatcagcaccgaaggcgacaccgacgtgcagcattaccgcgaagtcgtctgggaaggcaagctgccggcagcacaataaacgttcaacttattcaacatattcatcccgcgaagcgggaaaccaggaccggagagttaattcatggctaagcacattcctttcaaactgattgtcgaaaaagcaaaccactaccagcaggatatgacccgcttcctgcgcgatatgatcgctatccccagcgaaagctgtgacgaaaaacgcgtcgtgcatcgtattaaagaagagatggaaaaagtcggcttcgataaagtcgagatcgacccgatgggcaacgtgctgggctatatcggccacggcccgcgactggtcgccatggacgcgcatattgataccgttggcatcggtaacatcaagaactggactttcgacccctatcaggggatggaaaccgatgagctgatcggcgggcgcggcgcgtccgaccaggaaggcgggatggcgtcgatggtctacgctggaaaaatcatcaaggacctcggtctggaagatgaatataccctgctggtgaccggtaccgttcaggaggaagattgtgacggtctgtgctggcagtacatcatcgaacagtccggcattcgcccggaattcgtggtcagtaccgagccgacggattgccaaatctatcgcggccagcgcgggcgtatggagattcgcgtcgatgttcagggggtaagctgccacggctcggcgccggagcgcggcgataatgccatcttcaaaatgggtccaattcttaacgaactgcaggagctctcccataaccttggcaatgatgagttcctgggtaaaggcaccctcaccgtttcagaaattttcttcacctcgccaagccgctgcgcggttgccgacagctgcgcggtctctatcgaccgccgtctgacctggggtgaaacctgggaaggcgcgctggatgaaatccgcgccctgcctgccgtacagaaggccggcgccgtggtctcaatgtacaactatgaacgcccgtcatggaccgggctggtttatccaacggaatgctacttcccgacctggaaagttgaagaggatcatttcaccgtacgcgcgctcagcaacgcttatgaagggctgttcggtaaagcgccggtagtcgataaatggaccttctccaccaacggcgtttccatcatgggccgtcacggcatcccggttatcggtttcgggccaggtaaagagccagaagcccatgcgccaaatgaaaaaacctggaaacagcatctggtgacctgtgccgcgatgtacgccgcaatcccgctgagctggctggccacagagtaagtacgatcggttattcctcccgccgcgcgtcggcgggagtctggagtttttatgcgcgtactgattaaaaacggcatcgtggtcaacgccgacggccaggcaaagcaggatctgctgattgaaaacggcctggtcagccagctcgccgaacggataaccccgaccgaaccttgccagactatcgatgccgcaggttgctatgtcatgcccggcggcattgatgttcatactcattttaatatcgataccgggcacgcccgcagctgcgatgatttcttcaccggcacccgcgccgccgcctgcggcggtaccaccactatcgtcgatcatatgggcttcggccccgccggctgccgccttcgtcaccagctagaggcctatcacggatatgccgcctacaaagcggtgatcgactacagttttcacggcgttatccagcatatcaaccatgccatcctcgatgaaatcccgatgatggttgaagccgggattagcagcttcaagctctacctgacctaccagtataagttgaacgatgatgaagtgcttcaggcgatgcgccatctccatcgcgccggcgcgctaaccaccgttcatccggaaaacgacgccgctatagcccgtaaacgggccgaatttctggcggccggtaaaaccgcgccgcgctaccacgcccttagccgcccgctggagtgtgaagcggaggctatcgcgcgaatgatcaatctcgcccagctcgccgacaacgcgccgctgtatatcgtccacctctccaacggactcgggctggattatctgcgtctcgcccagcggcggcgccagccggtatggattgaaacctgtccgcaatatctgttgcttgacgaccggtgctacgagcgtgaagacgcgctgggctatctgttaagcccgccgctgcgcaacgtcagcaacaatgatgcgctgtggtgcggtatcgccgatggttcgatcgacgtcgtggcgaccgatcactgcgctttctcgatggcacaacgccagcagctctccggcggcgatttcagccgctgtccgaacggcctaccgggggtggaaaaccgcctgttgctcatgttttcccacggcgtcatgaccgggaggatctcagcgcagcgtttcgtcgcgctgaccagcgccactcccgcgaagctatttggcctgtggccgaaaaaaggacgattggcacccggcgcagacggcgatgtcgtcattatcgatccgcaacgcaccactacgatccgccatgagatgttgcatgacaacgccgactattcgccctgggagggctttatttgccagggcgcgattcgccagaccttatcgcatggccgggtcattttcgataacggcacttttaccggtagcgctggccagggccgctttttacgccgcgatcccttttctaccgctcaccttccggttagcggaatcacatcttaagtgaggcattcatgagtaagaaaattgtgctcgctctcggcggtaacgcgcttggcgaggatctggccggacaaatgcaggccgttaaacaaaccgcgcaggctattgtcgatctgatagcccaaggccaccaggtggtcgtaacccacggcaacggcccgcaggttgggatgattaatctggccttcgaagccgcagccaaaaccgaggcccataccccgatgttgcccatgtcggtctgcgtggccctaagccagggttatatcggctatgatctgcaaaatgccctgcgcgaggagttgctgtcgcgatcgatgcatatcccggtggcgacaatcatcacccaggtggaagtcgacgccaacgatccggcgttcaaaaatccgaccaaacctatcggctcttttttcaccgagcaggaagcggaacagctgacgcgtcaagggtacgtcatgaaagaagatgccggacgcggctatcgccgggttgtcgcttcgccgcagccggtcgatattattgagaaagagacggtcaaagcgctaatggacgcctgccacgtagtgatcaccgcgggcggcggcgggatcccggtaatccgcgaaggcaatcatcttcgcggcgccagcgcggtgattgataaagactgggccagcgccaggctggcggcgatgatcgacgccgacatgttgatcatcctgaccgcggtcgagaaagtggcgatcaactttggcaaacccaacgagcaatggctggataagctgtcgctcagcgatgccgagcagttcattcgcgagggtcatttcgctaagggttcgatgctgccgaaggttgaggccgccgcctcattcgcccgttcacgtccggggcgcaaagcgctcatcaccgtattaaataaagccaaagaagggattgaaggaaaaaccggtacggtcattgaagggtaaaaaggcacgaaatgtagatactgttttcccggaggcggcgcgttgcgccttatccgggctaccagaccgcacagaactgtagcccggtaagcggtagcgccaccggggattttgaggccatctacaccggcttcgtgctgctatctacgccaccgacaataactcactcttctcttttactcttttattcatcagcgtcatcagcgcctcaagcaccccaccgccaatggcgcgcgccttatcggagacgctggtaaaatcggcgctggccccgcgtgggtcgatatcgccaattttaaagccgctatcgaccactaacccatcgctgagcaaaccgcgcaccataccgcttaatggcgcaataatctcggcctcaccgacggtggcgatgatatcgccttcattaacaatatcacccagcgccactttcgcgcgcatcaccccggctcccggcgcgcgtatcacccgtcgtgaagtatgcccaagaatattaccaggaacgccggtgttctcctgcgctttgccatcgtaaatcacctgccccagccaatggccgcgattggtttcaatcaccgcatggcaatccacaccggcgcaaaaaccagggcccagcgcaattaccgctggcgccatctctcgctgcgtaccaaaattctctttcgccagtatggcatccacaacgcagacagggcgcagttcattgagcgattcgcacagcggatccaccaataccggaatcacgccattttcaatcacccggatggcctccttagcggatgaaactcgcttcgccaccactccttctaccatcatttcaccgtcgaagacggcctgggcaaaagcgacgctgcggcggataaccgtcggttttgcgacttccaacatcaccactttgaacccggcatgccacagacgcagggccacgccgctggcgatatcgccggcgccgcggatagcgaccaactgctgctgcgcaggcgtggctgccgccatcagcaagccgcctggcgcgcgattttttacctgcaggatttccgccagaatgctaatcgctatctcatgcggcgtttcggcgccaatgttatagccaaccggcgcatgcaggcgggcaatatgttctgcggcaacgccgttttcccgcatctggcgtaaaaacacctggactttacggcggctggccagcagcccaagccaggcgaccggccattcaatcagtttatccagcgcttcacgatcctggttattggtggcgattaacacaaagtcatcgccgcggatcgccagattctccaccgcctcgctgaaggtttcagcatgcagcaactgcgttgccggcgggaaatagtcagggttcaggctctctggatagatatcggccaccgctacctcaaaacccagcagcgccgcgctttgcgccaccgcgcggttaacgtgcccggcgccgatcagcaccagccgcgggcgcaggccatgtacgctaatatagaccgacatcgccccgccgcaatcggagccgaccgcatcgctgccgctgcgcgccatccgcccatgaaacatgcgcgacgctttttcgctgagcgcttccagcgcctgttcaatcactttgcgctcaaccatgccgccgccgatggtgccgactatcgaaccatcttcacggattaacatctgcgccgaatggcgcggcgttgagccgcggctgtcgacaatctgcgccagcgcaaacgggcgattctgtgcttcgagttttgccgcttcagagaaaatattcataacaacctcaatggatatccgctatgcgcccaagccggggcgtcactctgttgttcgtcgtcgcgttatcgcggattgctcttgtaccgctcccgcccacagtgcgttaatcccccactgctgcaacagcgcctgctccggtatattctcattttgagaaagctgattcagcagcaggatccggcgactggatggcggaacgcctttaaacgctccctgcggatgcgtaattaagcgatgcagcattggccaactcagcgccgtatccggcgccgcaccggcgatccgggaaaaaaggggccagcgatggacggtcgctggcccaacgttttgcccgagcctccaggcccccatgacggcaataacgcagcaacaggattgaggtatgcaaggttcgtgctcagctggcgcttttaaggcgaaaccgtgagccccgtcagcttctaccagcaccacatccacgcgccccgcagcaaccagcgcatcaagctgttgcgggctaaacccacgaaccttacccgcaggggcgagccatgaggcgtagcaggcctgcagcggccgctgccaaacctcgacaggcagcgtcagcggttcgcggcaaatcaccacaggcagtgatgccgggagatacatatgggtggtcgtggtgagcagaactcgccggccagcctcacgaaaacgctgcgccagccacattaaggtactggttttgcctcccgcgcctacggcggaaatgagcagcggaccatcatttacgcctaaatcacaaaacagcgattgcatatgcggtatattttccatgcgctggccaggattccattattcagggagaagtatgaagcaggtcgattgtattattaccgccgccggattgtcctcccggatgggacagtggaaaatgatgttaccctggcgcggaacgacaatacttgatgcaagtataaaaaacgccctgcaattctgctcgcgtattattctggtgagcggttttcgcgcagaggagttacatcaacgctattcggctcatccgcaaataaccctggtttataattccagctatcaacagggtctgtttacttctgtttgcgctggcgcgagccaggtgcaaagcaactactgttttattaccctcggcgatttaccctgcctgccgccagcgcttttccagcggctttggcaacagcgcggcgacagcgcccttcttccgcaatatcaaggcgtaccgggtcatcccatccttattaccggcacgcacctacgccaacttatcactcacgatgggcctggctcaatgcgcaaacggttattacagagccgccatcgctgcctggagttagattttccgcaaatggtctgggatatcgatactcctgccgattttattcgcctgcaaaaccagtattaatcatgtctttgtcgggaaattatcattgtgatatttcgccgtttattttgagaaatcccgacggataaaaatatagagtgattttaattctcattaccatagcgtgagcctattcacaaagccaggcgttctttagacctctctcacatttttaattattccccctgctgtctttaataactggttcgattgttgctcctccttaactatccgtcggaattagcaccactaaccggcaaatttgattgcacagataaaggagagggttatggggatatcatgcgtcccgtcccgtttgaggaattattgacgcgcattttcgatgagtatcaacaacaccattccatttttggtattcctgagcagcagttctattcgcccgtcaaccaacgccgggtaagcgtcttcggcgaaagctgcgccaccccaatcggccccgccgccgggccgcatacccaactggcgcagaatatcatcaccgcctggctcaccggcgggcggtttatcgagttgaaaaccgtacagatcctcgaccggcttgagctggaaaagccctgcatcgacgctgaagacgaatgctttaataccgaatggtctacagaatttacgctgcaaaaagcgtgggatgagtatcttaaagcatggtttattctgcatcttttggaagaggttttcccgttcacgccggcgaagaacggtaagtcctttattttcaatatgagcgtcggctataacctggaaggcattaaacaaccgccgatgcagcagtttatcaataatatgatgaacgccgctgggcagccaaaatttaccaagtaccgcgacacgctgaaccgctggctgcatgatgacgccttcctcgcccgcttgtcgctggatgatattcgcccacgcctggcgacgctcgcggagcgcattcctgcaaaactggtacaaggggttaccctctctaccatgcatggttgcccgccggatgaaatcgaagcgatctgccgctatatgctggaagagaagcagctcaacactttcgtgaagctcaatccgacgctgttgggctacccgcgcgtacgcgaaattctcgacacctgcggctttgactatatcggcctgaatgaagaatcattcgaacacgatcttaaaatcggccaggcgctggaaatgttgacgcgcctgatggcattggcgaaaagtaaacaactcggcttcggcgtgaagttaaccaacaccctcggcacggtcaacaataaaggcgcgctgcccggcgatgagatgtatatgtccggccgcgcgctgttcccgctctccatcaacgttgcggcgctgctatcgcgtgaattcgacggcaaactcccgatctcctactccggcggcgccagccagctcaatattcgcgatatctttgaaaccgggatccgtcccattactatggcgaccgatctgctgaaacccggggttatctgcgtctaagccagtgcatgcgcgagcttgagcaggccgatggctgggaaatgaatcaggtcgacgtcaagcgcttgaacgcgctggcggaaaaagcggtcagcatggagtacacgcaaaaacactggaagccggacgaccgcatcgacgttggcgagccgctgccgttgaccgactgttacgtcgccccttgcgtcagcgcctgcgccatcaaacaggatattccggaatacattcgcctgatgggcgaacagcgctatgccgatgcgctggagcttatctatcaacgtaacgcgctgccggcgatcaccggccatatctgcgatcaccagtgccagtacaactgtacgcgtcttgattatgacagtgcgttaaatatccgcgagctgaaaaaaatcgcccttgagaaaggctggccggaataccaacgccgctggcataaaccggctggttccggcagccgaaacccggtggcggtgattggcgcaggcccggcagggctggcggcgggctacttcctcgcacgagccggccacccggtcacgctcttcgagcgcgaagccaacgctggcggagtggtaaaaaatatcattccgcatttccgcattcccgctgaacttatccagcaggatattgagttcgttgttaatcacggcgtcaacattgtctacggctgcaacccgcatctcaccgtcgaaaaactccgtcaggagggttatcgctatgtactggtcggaaccggcactgacaaaaacagcggcgtgaagcttggcggggacaacccgaatattcataaatcgctcaacttcctgcgcgcgttcaaccgcggcgatcgcctgaacgtgggtaaacacgtggccgttgtcggcgcgggtaacaccgcaatggactgcgcccgcgcggcgctgcgcatccccggcgttgagaaagctacggtgatttatcgccgctcgcagcaggagatgccggcatggcgcgaggagtacgaagaagccctccaggatggcgttacgttccgttttctcagtaacccggaatacttcgccgctgacggcacgctgaccgtccgcaccatggccctcggcgagcctgatgaacagggtcgacgtcgcccaatgcccaccgatgaaacctggacgctgcaggtcgatacgctgatcaccgccatcggcgaacagcaggatggcgaagcgctggcggcgatggggatcccgctcaacgatcacggctggcctgaagtcaacgctgatggcgaaagccgtctggctaacgtcttcctgattggcgacgtacagcgtggcccttcttcgatcgtctcggcgataggcaacgcccgtcgcgccagcgatgcaatccttaagcgcgagaatatccgcagccacttcggcgataaacagtggaataacgtcgatcccgcggacatctaccgccgcaaagggaccattgctatcgctcaggttgataaagacgaccgcgatgcctttgtcgcgcaggaggcggagcgctgcctcgaatgtaattacgtctgcagtaaatgtgttgatgtctgcccgaaccgcgccaacgtctccattgcggtgccggggttcgacaaccgcttccagacgctgcacctcgacgcgtactgcaacgaatgcggcaactgcgcgcagttctgtccatggcaaggcaaaccttataaagacaaggtcaccgtttttagcctcgaacaggatttcaacaatagcagtaatccgggtttcctcgtggagcagcagcgggttcatgtccgtcaggacggcctgacctggcagctggaaatcgatccccagggtcagttcgctgaagtaccgccgcagttggatgccatgtgccgcatcatcagccacgttcatcaacatcatcactatttgctgggagccgtcgaagtatgagtatcttaatgcttaaaaatgccacccttgcccagcttcacccggcaaaagtggaagaaggtgtcgatatcgtcattgaaaatgacaggattatcgaaacaggcgctaaccttagccagcgttatccgcaggcgcgcattaaagatatgcgcggccgactggtgatgccgggaatggtctgctcgcataaccatttttattccggcctgtcgcgcgggattcaggccaatatcgcgccgagtcccgattttatctcgacgctgaaaaatctgtggtggcggctggaccgcgcgttggatgaggaatccttatactacagcgggctcatctgttcgctggaggccattcgcagcggctgcaccgccgtcattgaccacagcgcgtcgccgaaatatatcgctggatcattaagtcagttacgtaacgcgttcatcaaggtcggcctgcgcggcatgacctgttttgaaaccaccgaccgtaacggcggcctgcaggaacttcaggcaagcgtcgaggaaaatatccgctttgcccgcgaaatcgatcgggcgcgggaaagcggcgacgagccgtatctggtagaagcgcatatcggcgctcatgcgccgtttacggttcccgatgaggggcttttaatgcttcgcgaagcattaaaaacaaccgggcgcggcctgcatattcatatggcggaagaccgttatgacgtttctcacagccaccatcactacggtaaagatctgctggtacgcctggcggagttcgacctcatcgatagtaaaacgctggtagcgcacgggctgtatctgtcagaagctgatattgaactgctgaacgcgcacgatggtttccttgtccataacgcccgctctaacatgaataaccacgttggctataaccaacagttgacggcgtttcgcaacctggcgctgggcaccgacggcatcggctccgatatgttcgaagagctcaagttcgccttctttaaacaccgtgatgccgggggccgctgtggccggatagctttgcacgggcattaagcaacggtaacacgctgcttagccgtaactttaacgaccgtttcggccgtattgaggcgggctataaggcggatttaaccatcagcgattatattccgccgacgccgctgctggcggctaatatcgccgggcacatggccttcggtatggggccagccacgttcatagcgtgatggtgaatggcgtcatggtctatgaggatcggcagttcgctattgattgcgatatgattttcgccgaagcgcggaaggtggcgaagaagatgtggcagcggatggatgcgttgccgtaaacccatcactgtaaaacaaaacccggtcgctgtaccgggtttattttttggcttctaccggggctataaatagcacagaaacatcgatcgggtagcccggataagacgcagcgcgtcgccatccggggctctcctacaagctcaacaagctggcgctggcgatagttctctgtttctgcagcgccgcaagggcctcaccggtcatcagcgatattgccgccgttgggcacaccgatacgcaggccgggccaccgtctcgctgctcgcagagatcgcacttcacaataaccggcggatgcactgccgatgtctcgatagtaatcgcgccaaatgggcaggcgacgacgcagctctggcagccaatgcagcgcccggcatcggcctctacccgctcggcgcccatcgccaatgcgccggtcggacagaccccgacgcatggcgcgttctcgcactgatggcacatcaccggcacgctcaacgtgtcgagtcgcatcaccttcaatcgcggatgaaactccgccccgtcagccacatgctccagtgcgcaggcgacttcgcaggtacgacagccgatacaggcctgtgaactggcaagaataaaatgggtcatcaccgctccttatggtcaaatcgcgccagcatttcgcttgcggcctggcgcccggcaaccattgccgtcaccaccagatcggcgccatgtaccgcatcgccgccggcatagattttgtcatggctggtctgtgtggtgccgcgacccttgccgcccgttacaatctgcccccagcggtcaagtttgataccgtgcccccgcagccacggcatgtcgtgggcctggaaaccaaacgccagcaccagcacatcggccgggagttcgaattctgaaccggcaattggccgcgggcggcggcggccatccggccctggttcacccatttcggtacggatcatcccgacggcgctgacctggcctttacggttacgcaggatatattgcggctgaacgttaaactgaaacgccacgccctcctcccgcgcgttcaccacctcttttttcgagcccggcatgcttaactcatcgcgacgataggcgcaggtcacgctctcggctccgcgacgcaccgcggtgcgcagacagtccatcgccgtatcgccgccgcccagcaccaccacccgcttacccttaatgtcggttaacggatattcggtgctctcttcaagccccatcacctcacgggtgttggcaatcaggaacggcagcgcctgaataacacccggcgcgtcttcgccatcaagacccgccccatcagcccgtaggtgccgacgcctaaaaagaccgcatcgtagttagccagcagttcgctaaagtccacgtcgcgccccacttcctggttgagatggaaacgaatccccatgtcgctgaagatctcgcgcctcagcgccattaccgttttttccagcttgaaagacggaatgccgaaagtcagcagcccgccaatttcaggatgtttatcaaaaacatcaacctgtaccccggcgcgagcaagaatatccgcacagccaagtcccgccgggcctgcgccgataatagccacgcgctcctgacgcggcgcgacctcacctgtggttggccgccagcccatcgccagcgcggtatcggtgatataacgttccagattgccaaccgccaccgcgccgccttcgtttttcagcgtacaggcgccctcgcatagcctgtcctgcgggcagacccggccgcagatctccggaagcgaactactttgatgacagagttctgcggccgcaataattttgccctcacgcaccagtcgaatgaaatcgggaatatggttgtgtaacgggcaggtccagttgcaccaggctttttgcgcgcagtacagacaacgttcgctttcatattcggcatcacattcgctaaggcgctggtagatctcggcaaaatgcgctttacgctcctccgcggcaagtttcttcgcccctacccgcggcgctttatccagtatcgcgtcgcgccttgcgccacgacgctcggccagcggctgcccctgggcggagcggatttgtctttcccgctgcaaccgtttcagcgcgctctcgtccattacgcgcagcgcctgagtcgggcaactggccacgcaggcctgttctgcggaggggcgatcgcgacaaagatcgcatttttgcgccagttgcgggccatcttccccgctggcgaccatctcaattgcgccaaatgggcaagcgacgacgcagtttttgcaaccgatacactcggcctgggtaaactggatgctatcgttggcgacatacaacgcctgagtcgggcaggaggtgacgcaaggcgcatcgttgcaatggtggcaagtggtcgcagtactggcattctggtggaagacaacatggatgcgcggaacaaacgcgctgcgctgtgccggccaggcatcctgatgatgcgccgtgacgcaggccacttcgcaggcatgacatccaatacagttcgcaacatcggccacaataaatcgattcatttgcttcccttttattcttctggaatagtcttagggatggattgcaatattcgggcgatagttggcgctcaacttatgccgcaattcatttttgcgagtcagctcaaattattactcccctgtcactcccgaataaataaaacctcatcaaatcaccaggatggcatctcaaccctggactggctttttatcattttcatcttcttatcgcttatttcatctaccaaaatgagacggtttttatctcaaactgatattcaccatttttatttctgatgcccgctcgcagcgctatacaagcccgcaagaaataaacacgccaacccgtgattgatttcacaaatatattactccactgccgcatcgctcatttttggcacagcttacgcataaccctcctaacgcataagcaactccgtgcgcgttatacgctggtgaacatcatcagcagagggaggcaatggccttcgaatcgtaacttctaccctttcagttcggcacgggcagaagtcgtaaaggagacaactacttcatgaaagattttgccattccggcctcacgcaatacggcgactgtcgcgccggtcgatgaggtcctgccaattacgcaaatgattctctatggattgcagcacgtgctggtgatgtacgccggggcggtggcggtaccgctggtggtgggtaacgcggtcggtttgcctgcggagcatattattttgttaattagcgccgatttgtttatttgcggcgccgcaaccatcgtgcaatcgatgggcatcaagcagtggttgggctgccgcctaccgctgatccagggctgtactttcgccgcgctgatcccgatggtgcttatcggtaaagagtacggtatcggggcgatctccggctcggttatcgtctccggcatttttatcctctgctgcgcgccgtggattagccgtctcattcgcttctttccgaaggtggtgatgggcggaattgtgacgcttatcggcctctcgattatgccggtcgcgggggatggattggcggtggcagcagcgagatggccggtttcggcgatctcttctcgctactgatggcggccatcacgctggttattattcttaacctttataccttcgccaccggcgtggtcaaaaacacctcggtgctgatcgggctggtgatcggcactattttatggagcttcttcaaaccactggattttaacctcgtcaacgctacgccatggctacatctgccacaggtgatgcagttcgcccggcctgaatttcatatcgtgcccgtcgccctgctgtcgatggtaatggtggtggtaatggtcgaaaccatgtcgtccatcatggcgaccggcgatatcgtcggtaaacaggtcacggccagcatgctgcgtaacggcctgaatacctgcggactggcgacgacgatctgcggcttcttcaatctgtttccctacgcggccttcgcgcagaacgttggtctgattggcctgaccggcgtacgcagccgtttcgtggtgtcggtctcgggcgtcattctgatgctgatgggcattttcgccaaaatggcggcgctggtggtactgattcctaaaccgatcctcggcggcgccggtatcgttatgttcggcatggtagccgtttccggtattcgtactctcggtcaggtcaactatcgcaacaacaacaacgggatggtggtcgcgctcacccttggtctcggcatgatgccggtgctggtgccgaatctgtttacccagttcccgccaatgatgcagctgtttctacacagcggcatcactatcggcaccctgacggcgattgtcgccaacctgacgctgaacggcagcgtgccgttccgtatttctcacgatgtcccggaaccggacccggcgccgccgagcgcggctgctcgcaacatggccgtacgtacggtacgcatgtggctgctgctgcgcaaggtacagaaaggtcaaaccgccgctgacggccaggagtgattgatgtctatgtcgcaacgtctgctttttgcactgttgatgatggccctgatggcggttcccgccatccaggacgccattaccctcggaattaacagccgttttatctatctgttgccgtactatttttaaggagtcacacgatggaaaaagtaaccaccgtctgtccctactgcgccgctggctgtaagctgcggctggtggtggacgacggcatggtcgtcggcgccgaagcggccatggggaaaaacaatcagggaaccctgtgtctgaaaggctattatggctgggacttcattaacgatacccagatcctgaccccacgtctcaaaacccccatgatccgtcgccagcgtggcggcaaactggaagctgtctcctgggacgaggcgctcgattacgtcgccacccgccttggcgccattaaagaaaaatatggcccggacgcgatccagaccaccggctcctcccgcgggaccggtaatgaaaccaactacgtgatgcaaaaattcgcgcgcgccgttattggtaccaataacgtcgactgctgcgctcgcgtctgacacggcccttcggttgcaggtctgcaccagtcggtcggtaacggcgccatgagtaatgccatcacggagattgataacaccgacctggtgtttatcttcggttacaacccggcggattcccaccctatcgtggcgaatcacgtcattaacgccaaacgcaacggggcgaaaatcatcgtctgcgacccgcgcaagattgaaaccgcgcgcatcgccgacatgcacattgcgctgaagaacggctcgaatatcgcgctgctcaacgccattggccacgtcattattgaagaggatctgtacgataaatccttcgtcgccagccgttccgagggcttcgaggagtatcgcaaaatcgtcgaaggctatacgccggagtcggtggaagagataaccggcgtcagcgcccaggagatccgcgcctgcgcccggatgtacgccagcgccaaatccgccgccatcctgtggggcatgggcgtcacccagttctaccagggcgtggagaccgtgcggtcgctgaccagcctcgcgatcctcaccggcaacctcggcaagccgagcgtcggcgtcaacccggtgcgcgggcagaacaacgtccagggcgcctgcgatatgggcgcgctgccggatacctatccgggctaccagtacgttaagttcccggaaaaccgcgagaagttcgccagagcctggggcgtcgacagcctgccggaacataccggctatcgcatcagcgagctgccgcaccgcgccgaacacggtgaagtccgcgcggcgtacattatgggcgaggatccgctgcagaccgatgccgagctttccgcggtgcgcaaggcgtttgaacagctggaactggttatcgtccaggatattttcatgaccaaaaccgccgccgcggccgacgtcatcctgccgtccacctcgtggggcgagcacgaaggcgtttataccgcagcggaccgcggcttccagcgcttctttaaagcggtggagccgaagtgggacctgaaaaccgactggcagatcatcagcgaaatcgccacccggatgggctatccgatgcactacaacaacacccaggagatctgggatgagttgcggcatctgtgcccggacttctacggcgccacctatgaaaaaatgggcgagctcggctatgtcatgtggccatgccgcgatgagtccgacgccgaccgggggacgtcgtatctgtttaaagagacgttttctacgccgagcggtaaagcccagttcttcacctgcgactgggtcgcgccgggagataaactttctgaacagtatccgctggtgctgtcgacggtgcgcgaagtcggccactactcctgccgttcgatgaccggcaactgtgcggccttaaccaggcttgcggatgaaccgggctatgcgcaaatcaacaccgccgacgccgaacggttgggtatcgaggatgacgcgctggtgtgggtcaattcgcgtaagggccgcatcatcacccgcgcgcaggtcagcgatcggccgaataaaggcgcggtgtacatgacctaccagtggtggatcggcgcctgtaacgagctggtgtcggagaacctgagtccgataaccaaaacgccggagtacaagtactgcgcggttaacgttgagcggattgccgatcagcgcgcggcggagcagtacgtaatcgacgagtacaacaagctgaaagcccgcctgcgcgaaagcgcgatgggttaaggttcagcggccatacccgatattcgggaaccctccccggtggcgcttacgtttaccggggcttccaaccgaataccgaaccgtagcccggataaggcgctatgcgccgctatccgggaatcctcccgcggtggcgccttatccggccaccaaatcgcacaaaacagaagccccgttacaagatcacgatttaatcgcgtgttgaatggagtcaataatcggctgatagccggtacagcggcacatattgccttctaatacatcctttatttgcgcttcgtccggatgcggctctttggttaataattcggtggcgctgaccagtactcccggcgtacagaacccgcactgcacgccgcccttctcaataaatgcatcctgtaatttttgggtaatcggattatcgtttaacccttccagcgtctcgatctccgcttcatcacactgttcagccagtaccagacaagaacaaacggcgttaccgtccatcagcaccgtacaagcgccgcattcgccaatcgaacatccctctttagtggcggtaagatgcaatgtatcccgcaccagatccaataagcgcatattgccttctacttttgcttccaccagcttgccatttaccttcactttaattgtgctcatagctttatcctgtacagggcgctacgcgccctgattgaatcattaaatccctgaggcccgttgcgcctcggccatcatgtcgcggaacatattgacgaacaccggctgcttatatgccgccgaccatcgcttaccgatggccgcatagataagcttgtccagcacctcgcaggcggtgttaatcgtgtcgctatttaacggtttccccagcaggcagcgttcaatatccagcaaccgctgcggcttactgaacagcgcgccgtccaccagacggcagtagctcaccgtgccatcatcagcaaaatcgagcagcgcgctcaggctctgacgggtgatgttgagcgcgttgcgccgccctaactggtgatagaaacctttagcccgcggacgcgccggcggcggcagtatcactttggtcaaaagttcatccggctggcgctgggtcttgtagccagaaagcaaaaactcgcccagaccgagggtgcgtgcgccatttagcgagcgcagttcgatgcgcgcatcatagaggatggcaggcggaatagaatcaccacaggggcggcgttgacgatattgccgccgatggtggcgcggttacggatctggtgtgaaccgacggtatgacaggcctgcaccagcagcgggtaacgttcgcgcagcagcggatgatcggtaatacggttaaaggtcatcgccccgccaatgatgacctcatggctgaccggatcttcgctcacctgcgtcaactccggcagacgggaaatatcaaccaaccgcatcgcgcgggtttgcagacgaccctgcacaatgacatcggtaccgccggcgatagccgtcacgccctcttgcgccagaagggttaacgcctcctgcaggcttttcgcgcgagtcacttccacgtcagtgaggcgcagcacctgcttcttgttttccgcctccagcatcatttcgctttggcgaaccggctttttaaggttgtagccgaggatcacctgttcgagggtcaacggtaatttattaaaccgcgtctcgagggcaaaactcaccgcgttgttgatagccgccgccgccagttcagtggctggttcgccgatccccttcgcccccagaggcccggcgatatccgggttttctacgccgataatcgtcatcggtggaatatctttcatcgtcggcagcaggtagctgtcgaagttttccgatttgacctggccattttcaatgttgaagtcttccagcagcgcgtagccaaaaccctgtgccaccccaccgtaaacctggccttcaaaccccaccgggttgagtacccggcccacgtcatgggcggcggtaacgtgcagcagatcggttttaccggtgctggtgttcactcttacctccgccacctggcagccgtagacccaggtaaagtacgggctgccgcaccctttttcttcatcccagtgaatgggcggcggcacaaaccagccgtactcggtcaggctgacgctggcccatttggttttattgaccgccgttttgaaatcaatacgccgatcaccgtcctggacgttgatgataaagccatcctgccacaaagtttcagccaactcgcgggtaccgatgctgtcggcgacgacgctgagaatgcggcgttttatcttgtccgcggcgtcaagaatcgccccgccgccgaccattgtcccgcgggtcgccgccgtcgatccgccgtcgccgataaccgaggtcggcggctccataaaatgcagttccgatagaggaataccaaaggcttccgcggcgattagcgacattgcggtttgcagaccctggccgttttccgataccgatgtcgccagattgacgctaccgtcctcattcacctgaatgagcgccgttgaggtatcaaccccttccgcgccaatggaacaaccgcggtagctcagcgccaggccaataccatagcgataaacaccgccttgttggttcaattcacgatagtgctggcgttttgccgcaaattccgaggcattcaccgccttgctcaggacttcagtcgccgagacggtgtgtttatcaaaccgctgcccggtgaccgaggtatctccctgacgcagcgcgttcacttcacgcaccgccaccggcgagagattgagcacttcggcaatttcatccataaaggattcgttggcgtaaaccacctgtggtgaaccgaaaccacgcatcgccgaggtatagctgttgttggtatagacggctttgacgtcgatatggacgttatcaatattgtacggcccagcggcctgcaccgaagaacgccaggtgacgaacggggaggacgccgcatagccgccgctgtcggcaagaatatcgattttgatcgccagaatgcgtccgttgtcgtccaccccagcgcgatacttcattttataagggtggcgcttacagctttcgataatggactgctcgcgggtgtaggtaaatttcaccggacgaccggtcaggcgcgtcatcaatgcggaacggcaggccagatgatcgatgatgtcatctttcccgccgaacgaaccgcccatcaccgcgcgtttgacgttaatctggctctgcgggcaacccataaacttagccacgaagctgcgtacgcggtgcgggttctgaatggagccggagataatcaggctaccatcggtaggatcaagccaggtcagtacgacttccggttcaatgtacgcatgttcctggaagcccacttcatattcacgttcaatcacgtgactggcttcggcgaagcctttggccatgtcgcccttaacggtgtggtgatgggcggcaatattatcgctgcgttccgggtgaattcgccgggcatccggcgccagcgcggcttctacgtccgttagcggcacataaggcgtatagcgcacatgtattttatccgccgcttcgcaggcggcttcataactggttgccgccaccacggcgacgacatcgccgtgaaagactacctcgtctttgacgataggcagataatctttgacgattatccccacgaccggagtaccgggaatatcttgccaggtggcgatttttaccacgcctgcaacattcagcgcctcgctaagatctatcgcctcgattttcccggcgggtatatccgcaaagcggcaaacgccatacagcatgcccggtaaggtaatatcgtcgccataaacggccgttcctttgactttcgccagtccatccacgcgccgtagcggcgctgaaggtgaagcacacataacagtcccctcaatgattatccgttgcgggcaatcccgggtttgctaaacgtcgcgctatccataacccatgggaaaagccacatcaccgataacaaatccaagatttgtgccagaaatcaatgaggtgccgtttaaacctcgtttttgtgagtcgtcacgcaaaatgcggctaaagtgcggagaaaatagcgcagctaaggccgtgacccgcaggccagtaacatttcgccgccatttttatcaaagtgatagcccggttttctcaaattaataatttgcccgtgtgctaaacggtatagatacggatctcgtgttcacggaaagcatcccggtatttacggctgatgttttcctccacgaccagcacgtcaatggcgctgctttcagctaccacaaaacgcgcgacggcggggattttatctgaggttaagccaacgataatttcactgcactgtttgataaccgctttcttaaattcacaatcggcgtgatcaaagccggttagacctgactccggagccattgcgcagccgccaataaatccctgatcgaagaggatcccctgcacctgggccaccgccgatgcgccgacacaaccaccagccgcgcgttgcaccagacctccgagtatcacgacctcgtaaagcggttttttaagcagaaccgccgcaatttccggagaattagtgacaacggttaaggccagctcgcccggtagcgcttccgccattgccagattggtggtgccggtatcaataaaaatacagccgcccggtttcactagctgtgcgcacttctgtgcgattctgctctttgttgccctgtttttctctttacgttcgttgtactccatggattccggcagggtcatcaccgcgccaccgtagactttcttacaatatccgtctttgctcaactcatgaagatcgcggcgaatagtgtgttcagagacctgtaagcgctgggccagatcggcgcagacgaccctaccgtcctcctgcaggatctgacaaatcagcgcttgtcgttgctgagggaaagctgcataatcgagcacaacaactccttaaaacaaacataacgagcagaaaagagcataatcattcacttatgcgcatgctgtcaacccgaccctttacgaggtaaaccatgaaagttgcccatatcgccctctggacccgccatcttgagcagcaagcacgcttttgggtggagttttttgctggcgaaatcaacgaaaagtaccgtagtaaaaccaatcctggttttgaatcctactttgtacaaattggctctgacgtggccattgagttaatgtccaaacccggtttacatgactcgacccacgataacaaccatacggggtgggtgcatctggcgattgccgtcggcggcacggaacaggtgaatgcgttagccaaacgcgctgaaatggcgggaattttagtctctgccccacgcaccaccggtgatggctattatgaagcggttatcaaagaccctgatggaaacctggtggaaatcgtcgcatagtaaggcaaatccacatgaaggagtcgaccgtggcacattatcgcgtcattgataaagcgagctggcctcgcctggatcactttacgttctaccgtacctttgccaatcccagcttcaatctgtgcgtgccgatagaagcgcaacagttgtacacctgcgcgaaagaccggggcgtttccttctttcaactggcattattcggcctgttgcgtgcggccaacgccgtaccgcagctgaaacagcgcctgcgcaacgaagatatcatcgaatatgacgccatctcggtgatgacgccgatcatgaccgccagcgaaggttttcgccaggtatggtgcgataacgccgcggatttccccgcgtttagcgccgccgcgacgccgcgtattgaggccgcaagaagcactaatccctcaccgcttattgtggaagaagaaaatttcttttgcgccagttgcctgccgtggctgcacttcagcgccatgacacatgcggaatactacgttggtgcggcagtacccgccttgacgtggggaaaactgaaaaatggcatcattccggttgccggccgatttaatcacgcttttgtggatggcctgcacgccagccgtttttatgccgaagtcgaatattatttcgccaacccgcaggccctgtggctgtcggttgaggcccgcgattagctgccgcggcataaagaacaatctactatgacttccccgaaaaccggcattatattgccggttttttgctaatgcgaaatggctataacccatagcgtttcgttgttagacagtattcaacgcgcctcttatcttcgtcatgaattgtaaataacaacgcaatcatttgatgaggtagcacttttgtccagattacggcaaggattaaaaaccagacaaacgcgcttcgcgctggcgctgaaagtggcgctgctcggtagcatggtggcattttcttctgtcgccaacgccgacgatactcttaaagaagggatcactcccgcaaccgatgccagccagatcccggccagcgccaaactgcgtaaagacacggtggtggctggcatttccgaaccgcaggggatctttaacccttacttcttcgtcaacggttgggatgagaacgtcaccaacgttattttttcgcgcctgattgactgggacagtcagggaagctggtgccggggctggctgagagctggacggtgagcgcggataacaaagtttataccatcaaattacgccctaacctgaccttcagcgacggatcgccactcaccgcggaggatgtcgcctttacgctgaccgttctgctcgacccgaaatatgacggcgataccgatatcactctggccaatatcgctggcggcgcggaatataaagccggcaaagccgatagcgtgagcggcctgaaagtcatcgatccgctgaccctgcaggttactaccacccagccgggcgcgacaacgctggcgaaaatcggcggtccggtattatcgaaagcctggtacggtaaagggtatcaacgtgggaatctggattatctgcgttctctgcacggaaaaccgctgggtaacggtccttatgtctacgataaatatattcccggtcaggagattcgcttccacgccaacacgcatttttaccgcggtacgccgccaacgccgcgttttatctatcgcgtgaccaatccgtctaccaatttccagttattccagaccggcgaaacagactacgacgccttcacctcgcgtccggatgatattgagcagcttaagatgctcggttttgccaatatcaacctctacggttccagcgactacagccaggtggagttcaacgtccatcgcccggcgctgcaggataaaaaagtgcgtcaggcgctgatttacgggcttgaccgccagaagttaatcgacgtggtgtatcagggatacggcaaggtagccattgaaccgatcgcgcctatttcctgggccttcaacgcacagggcgtcaacccctaccattacgatccggcgcaggcgaaaaaactgcttgatgaagcgggttggctgcctggcgccgatggtatccgcgtgaaagacggtaaacggctggaattgaccctactggcgagcaaaaaagttattaacgatgcgctgatcccgattgccaaagagaactggcggcagatcggcgtgttgctgaaaccacaggtggttgatttcaacgcgctgatggcgcagcgcaaagcgggtaattacgatttggcgtcgttcagcaccagcactctcaacgatccgcatgacggcgtgtgggacttctacagcagcgaagccaaagagtcgggctaccacaacgctgaagtcgataagcttatcaatgcgggcaacgcggtgctggatatcgaacaacgcaagcctatctatcaccagttgtaccaggtgctggccgaggatccgccggttatcctgctgggataccgggaaattctttccgccagcagcgcccgcgtgaccggctttaagccggatatctataacggcctcaccggcagtttgccggacgtgaaaatcgtgaagtaaatccccagccgccggcctcccggcggctgatgtgagaatgttatgaaaaatttcatcctgaggcgcatattgcaaacgctgccgatgctgctgctggcctcctttatcatttttatgctctttgctaaaacccccggcgattttatcgatggcaacatcaccctgacggccgcccgcgccgccgaactgaaggcgatatacggcctcgaccagccgcttttcacccgctaccttcactggctggggcaactgctgcacggggatttaggcttctcgctgcaataccagatcccggtcagccagttactgaaccagtacatctggaactccttcctgctggcaagcgtggcgctggttttctactggggatcggactgacggttggcgtcgtttccgcgctcaggcccaattcatggtttgattatctggtgagtatcgcggtgttcgccgcgatgtcctttcccacctttttcctctgcctgctgctgattaagtggtttgccgtcgacctccactggctgccggtaggcgggatgaccaataccggcagcgacgataacggctggcagtatgtgctgcaggtcgccgcccatctggtactgccggtactggcgctggtgatgctgcaggccgggagcctgacgcgctatttccgcgccagcatgcttgacgtggtgaagatggatttcattcgtaccgcccgagctaaagggctgcgagaacgcacggttattatgaaacacgcgctacgcaatgcgttactgccggtcattaccctgcttggcttcgaactgccgggattgttctctggtgccatcattaccgaaaaagtatttaactggccgggcgccgggcacattcatatcgattcgctggccgctcgcgattatccggtgttgatggggtttaccctgtttctggcggtgctgacgatcatcggtaatttactggccgatgtgctctacgcgtgggccgatccgcgcattcgagtgaggtaatgatgataacttccctgtttggttaccgtcgccgcctgcgccaggcgacaatccccgcgcttgcgcaaataaccccctctccatggcgtcaggcatggcgccaactgcgccgcaaccggatggcgatgctgtgtttaatcctgcttgctgtgatggccacgtggtgcgtactcggaccgatgtggtcgccgtggaaagatgacgccaccgatgcgctgatggtcaacaaaccacccggtgccgaacactggttgggtaccgattttcttggccgcgatatctatacacgtttgctactggccggtcgcatttcgctgataatcggcctgctaaccatgctgctgtcggttacgcttggctatctactgggggcgctgtctggctatgtcggcggactcaccgacaagctgattatgcgtctggccgatctggtgatgacaatccctggcctgccattgttaatcgtcgccggcgcgatgctctccgagctcgacttttcagcggattcccgcatctggatggtcgttattatgctcagcctgctggagtggccaaagctggcgcggctggtgcgcgggcagtgcctgtcgctacgcgagcgcgattttatgctggcgacgcaggtactgggactgtcggcgcgccgccggctgtttggccacctgctgcccaataccatcccgattctggtggtgatggcgacaatggcggtcgctaacgccattctgagcgaatccgcgctgagctatctcgggctcggcgtggttccgccgacgccgtcatgggcaatatgatggatgccgctaacagcctgattgattttcagcggcgaccgtggctatggatgcctccgggtattgccatctttattaccgtcattgctatcaacgtgctgggcgacggcctgcgcgacgcgatggacccgaaaatgaaacagaggctgaaatgagcacgccattaatttcttttaagcaactttcggtctctttcgctgctgaaggaagccgggtgcgcgcggtacaggaagtctccttctccattcaggccgggcaaactgtgggcatcgtcggtgaatccggctgcggcaaaagcgtgaccgcgatgtcgctgatgggcctgttgcctccccatgtcgcgcgcattgatggcggcgagatccttttcgaaggacgcgatctgctcacgctgaaagcccgtcaaatggccgacctgcgcggcaaccagttggcgatgatcttccaggagccaatgtcggcgctcaacccggtactgaccataggcgaacagctctgcgagccgctcatccgccatcgcggcgaatcaccgaaagccgcctggcagcgcgcaatacaactgttaaacgaggtcggactggcgcgcagtgaaagcctgatggcgtactatccgcatcaactttccggcggtatgctgcaacgggtgatgatcgccatggcgctgagctgcgggccgcaattattgatagcggatgaaccgactaccgcgctggatgtcaccgtgcaggcgcagatcctgcgtctgatacgtgaccgcgcgcgcgaaagccagatggcgatgctgctgatcacccacgatctgggggtgatcgcgcagatggccgaaagggtcgtcgtaatgtatgccgggcggattgtcgaacagggaaccaccgtcgaggtgctgcgccagccccagcatccctatacccgcggacttatcgcctcgcgtccggtgccgggcacgcgccgccggcggctttactccattcccggtcaggtgccggatctcgcgcaactgcctgcgggctgcgcgtttgccgatcgctgcgaacaggcaaccgcacgctgccgtcaggacaccccgccactttttgggtcctcgcatcaggcagcctgtttttatagtcaattcgcggagtcggtggcatgaaccagccctatttaattgaagttaatggcttgaaaaagtatttcccgctgcgcgacggcctgttcggccagcagaccggcgaactgcgcgcggtcgatggcgtcagttttaatattcgtccgggaacgatttttggtctcgtcggagaatccggtagcggcaaaacgaccgttggccgcaccttgcttggcttgtatgacaaaaccgccggcagtattaaataccgcggtcaggagttgtccgaactgccagcggcagcaatgcagaccctacggcccaaaattcaactggtgtttcaggatccctatagttcactaaatccacgcatccgcatcggcgaggcgattggcgaggcgatgctgcagcataaactgtgcacgcgcgctgaactctatgagaaagtcattgcagtgatgaagatatgcgggctggcgcctcagcattaccaccgttttcctcatgaattttccggtggtcagcggcagcgcatcggcatcgcccgcgcgctgatccttaatccggactttatcgtcgccgatgaacccatttccgcactcgatgtgtcaattcaggcgcagattatcaatctgtttgccgacctgcgcgacgatcgtggcgtcacttttctattcatctcccatgacctcggagtcgtggagcatctgtgcgacgatgtggcggtgatgtacctcggtcaactggtggaaaccgccagccgcgatgcgctgtttagccgccctcttcatccctatacccaggcgctgctggccgcggtacccaccctcgatcccgaaagcgaaccacaggctgtcgtccagggagaaattccggatccgtcgcgcccgcctgatggctgccggttttcgtcacgctgcccgcaggcaagcgaccgctgccgccgtcaggcgccgacgcttcgcgaaatttcgcctggacacctggtcgcctgtcattgggcaggataacgatgaccatcaagaggcgaggcatattttctacggagtataaaaataagaaaacatgacattgttaaggttatgcgcatgtcatatcttcaaagcgtgtacttcactttaaggaacaatcttatgattaagcgtcgcactcttaaatctgcacttgcggcggttatttcgctcgctgtccttgctgcgccagtttatgccaacccaggtaatggcaacgggggtggcggaggtcatggcaatagcggcggaggtggtaaccacggtaatagcggtggaaaccacggcaatagcggtaaccatggcaacagcagtgaccacagcaacaaaggtcagggaaatgataagtcgaaagaggatcacggtaaccgtaaaaactacggcaaacccgaccatgtcgactctgatattaacttctcgcgagcccgttctctggcggtgaattatggtctggtaggttatcaggcgctaccgccgggtattgctaaaaatgtggttcgcggcaaaccattacctccaggtattgccaagaaaaccttgccggcatctatgattaacgatctgccttattacccgggttatgaatggcgtgcagtgggcgatgatttagtgctggttgcgttaagtaccgcaatcgtcacttccgtcattaacggcgtatttgattaattttttcatctttcaggctacacgccgaacgtcaaaaaggcccaccaccaggatgggcctttttttggcatcatgcgacagggaataatgaggatccagacggactggcggaaagcgctaagaatattgccgtgcaatggattttaatgatttgagagtagaaaaaaccacgggttcgccgatgtctctggcctacgtcaatgccgcagggcagcgtattgcgcagagtgatattcagagagtaaaagtccaggattgacccctgctacgccccggctgtcagccaggaacaggtcccgtttaccgggacctgttttgtttagagacgttattcctccagcgcgtaggcgatgatatcgtcaccaacgtccggcgagtggctggcgccgccggcggaaatcagcacgtactctttgccggttttcggcgatttgtagaccagcggcgccgctaccgcgccaaccggtaagcgagcacgccacagctctttaccgctggcggaatccagcgcccgcaggtagttatcctgggtgccggcgaagaacaccaggccagaagcggtagaggttgggccacccagcgtcggcattcccagcgggatatgcagatgggttttcatccccagcggcccggtatcttccaccgagcccatcggcacctgccacagtagctgacggctgttcaggtcaatggcgctcatggtaccaaacggcggagtattacagggcacgcccagcgcggactgcaggatgtcgatacgcacgccgccgtaaggcccggccacttgcgggcgaacggtgcccataaagccaggaacttcgtcggtggaaactttgtatttcgccatctcttccttgcgcaccagcgacatccgcaacggcatacgcatatcgttgacgaacagcgtaccggtgcgttcatcgatggtgataccgccccagttcatgccgccgagcaggcttggccactcgatatacggtttctctgacggcggcgtatacatgccaaggtaagtcgactctttaaagtcgatgcggcacatcagttggtcgaacggcgtcacgccccacattgatttttcgctcagcggctcgacgcctaactgcggcatgccggtggagaacggctgggtggcagacagatgttcgccctccgctccctgatgagcgaccggcagttcttcgacgcgggtcaccggtttgccggtgcggcgatcgagcacgtaaatctgtccggttttggtggtctgaatcagaaccgggacgtcctcgccctgctcgtttttcatgtggaacagtaccggctgcgatggcaggtcataatcccagatatcgtggtgaacggtctggaaaacccattttgttttaccagtactggcgtccaccgctaccaccgcggagccgtatttctctttagcttcattacgatcgccgccccaatagtcaggcggcccgttgccggtcggcagatagaccagattcagctctttatcgaagcctggaatggtccacacgttcggcgtttcgagggtataaacgcggcctttttccgggtcagtgatattttccggcttgccgacatcccaggcccagacgacgttaccatcgcgtacgtcaaaagcgcgtacgaccccggatggctcgccgtgtacgatatcgcgtacccaaccgcccagcaccgcaatatgccccatgatcaccggcgttgaagtcggatggtagcgtttgctgttttcggtgtcgcccatgccctgcttcagatccacgctgccgtggtcgccgaagtcatcgcacagttcgccggtttttgcattcagcgccagcaggcgcgcatccacggtcgataccatgatccgctgcggacactgttgcagcgccgggctcgctttttcttccgcactgagcgtatcgtcgctctgcacatcatagtaacccacgccgcggcaggtcacatgttccgccgtctgcgcgtgcgggtcaaagcgccagcgcgccttaccggtatcggcatcaatggcggtcaccacgttgagcggcgtacaggaatacagcgtatcgccaatttgcagcggcgtattttcgtcaacgccgatggccgggccggtcaggcggcggcctgtgtggtaggtccaggcgactttcagcttatgaacgttttccggggtaatatccgtatacggcgcaaaacgggtgccagaggcatcgcggccgaagaactcccagttctcgctttttgactcctgcgtcgcgctattgccattcgccgctttcactacgccattgtggatgccgccgtgcgggtagaatgccgaaaccagcgtcgccagcagcgcgataaagataaccgtggcgctccagttcgccagacgcacgcgagccaccggcatcgccgccgccagccacagggccagcattagcatcagcgcaggaaccaccagacgagggatcaggccccagtagctgagctgcacttcatacagcgcccagaccagggttaacagaaaggtaataacagcgagaggaagcgcgtattgactacgagtgaagtagccgacggcgatgacgagataagcgagaccggctaacagataccaggcgctgccgccgagcgagagcagcttgcccccccagatagttaagaaaaccccaatgccaaaactcagtaacacaaaaagcaatcggtatatggtgaagaaaatccttcgaccatgccctttttgttcgtccatatttcatcccattcgacagatgtcgatataaccaaagcatttatttttaaagcgcttatcggtaagtcataccgcacagcgcagttaacctgttggttggacgccccaagccagggcgaagaacgtaagaaagtatatggacatgtaaattttatgtaaaatttaaccgcataaaatgtttaaaatattttaacttataaactgaatttgatagatgagcaggttgtataggagagtggtgttaagcaggggccgcggggagagagatagcatctatcatgggtgccgacccgccgcccccggcgaatcggcaatccagtattaaggtttgttggcgctttcaccaacggttatcttctgtaatgcggcgatcagatccaactgagcctgttcttttaaactttcacgtttaataaactggctgcgatgtttacttttcacctcttccagactttttttaatctcttgtgcaggtaatttgtaccaaccacgccgctgcttctcgccgccgatttctaaccacaactctgagtaactggctttcaccttgtcgctcttcacatggtagtcgctgtcgatggcgtagatctcacgaatattaaagtggcgcaataacccgtacagcagagtgataatcaggttttttggccgcgtgccatagagctctttggtcaacgctttcacttcgtcattgccaatgtctttaccgccctgaataccgccaatccacgcactaccctgatcggtgcaggaaaaacagacgctataaacgcgtttattttcaaaaaacatctgcagcatcagttccccctcttcctggaacggcgaggcgagaagtttcacttccaggctggttccattttttagcgggatggcaatcatcgaacaaccgaacgctgatacattatacaactgcggtaatatttccgcttgaaagcttttttcaataaaattcaacgcgccatgagcaatatttagtttagctcttttcgacattcgcttatttaaataagctttgaagggcttatcttcaaaatgtaccagccccggcgtctcgctggtcaatttagcacagctgtatgtctggcaaagccgttgatattgcttgtacttacctcctgttaaaggtatttcgcggcacttacgcaacacctttttatatttaagtttaacgtgacaaatgactttattatttctccgccattctttgatggcagatgctgttatcgataccattgatcaagatccatagactcatccataatcgcggccatattatcatgtttgaaacgggtcaatggttatttgcaggttcgttgtcatttcatttaagaaataatccgaaaattatcattttatgctctctgtataatacacaaataatgtcaactataaataatagcggttattgactaatactccgccctcccgctacctgaaataggctgacgattaacgctctgtgcgatagcgttgggcgcgggtgcaaccatcaaccgttttgacctatactctgccgacagtcaaaacagtagcaaagtgggtacctcatggaaattgatctcgacaacctggtttttagcggtctggacgaagcggaagaacgtaacgctgaacgcctggatgaagcggataaaaaagcgcaggcgattgttgccgatgatgattgcggcgatgcctgcaaaatctgatgattaaaccggctcaccaggccggttttttttcgcctgtaaactgcctaagcgggcaaaaagcccttcagcgtttccagcagcgcctgcgccgctttcgacaactgcatatgtccggcgtgaatgacgccaatacatttctcaatcggcgggtcgcttagcggtagacaaaccgcccccagcgactgcatctgcgactggcataacgcgggtaccgcgctgccgcccagaccgctggcgaccatccgcccgacggtaaccaactgatgactttccagcgccacgtctaattggctgccgctacgcgctaacgcttcttccaacatcaaacgcaccgccgacggtcgctgcagggtaataaaatccagcgtcaacaattcacgccagctcaactgctttttattcgccaaaggcgacgttttcggcacgatcgccacaaagcgatccaccgccagcggcgtaaacagcagattgttgccgggcgatggctcaaacgcgatccccatctccacccggccttcgcgcaccatctcaatgacctgctcattaattacgtcatgcaccgtcacattgactcccgcatagcggtcgcggaaggcttttagcacttccggaagcacgttagcggcaaacgacggcatcgcggcgacggagatctttccccgctgcagggtgaaactttgccgcatcgcctcttcggcattatcccagtccgccagcagctggcgggccatcggcagaaaggtttctccctcctgggttaaggtcactttgcgggtgctgcgctgcagcaatgccccgccaagcgcctcttccaaccccttaatggtcaaactcagcgccggctgcgacaggttcaggcgctcgctggcgtgggcgaagttaagagtgtgagctaccgctagaaacgcgcgtaactgtttgacactcattctcatttttctacccgttaactaattgaaagaatttagttaacgataaattaataaaaaaaccaaatgagtgggtcacaaattcaaaattatcaaatcagtccgcgcccttaatgatagagccatcgcaaggcaggagaaaaataatggcaggactggataagcgcgtcgccagctatgaagcggcgctggacggattaaccgatggcatgacgttactggccggcgggttcggcctgtgcggcatcccggaaaacttaatcgccgaggtcaaacgccgccgggtacagggcctgacggtagtttctaataactgcggcgttgatggctttggtctcggcatgctgctggaaacgcgccaggtacgcaaagtcgtggcctcatacgttggcgaaaacgccctctttgaacaactggtactgagcggcgaactggcggtggagctgaccccgcaaggtacgcttgccgagaaaattcgcgccggcggcgccgggatccccggattctataccgcgaccggttacggcacgccggtggcggagggcaaagaagtgcgtcagttcgacggtaaacattacattctcgaagaagccattcgcggcgatttcgcccttgtaaagggctggaaagccgactggtacggcaacgtggtctaccgccataccgcgcagaattttaacccgttgatggccaccgccgggcggatcacggtagtggaagtcgaagaaatcgtcgcgccgggcgaactcccccttccgccatccatacgcccggtatttatgtcgaccggctcatcgtcgggcaattcgaaaaacgtattgaacagcgcacgctgcgcgccggagggaactgaacatgttaactcgcgaacaaatggcgatgcgcgtcgcccaggaactgcgcgacggcgattatgtcaatctcggtatcggcattcccacgctggtcgctaactatattcccgccggtattgaagtgatgctgcagtcagaaaacggcctgttggggatgggcgaatttcccgatgagtcgaccctcgatgccgacatgattaacgccggcaagcagaccgttaccgcacaaaccggggcggctatctttgactccgcccagtccttcgccatgatccgcggcggccacgtcgatctcacggtgcttggcgcttttgaagtcgatgtcgagggcaatatcgcctcgtggatgatcccaggaaaaatggtgaaaggcatgggcggcgccatggatctggtggccggcgcgcaaaacatcatcgtggtgatgacgcacgcctcgaaaaacggcgaatccaaactgctggcgcagtgtaccctgccgctcaccggcgcgggctgtattcgccgggtactgaccgatctcgcgctgctggaaattagcgacggcgcctttgttctgcgcgaatacgcccccggcgtcagcattgacgaaattgcccgtaaaacggccggacggctggtcattgccgatgatgtccgcgaaatgcgcttcaactaaggaggcaatatgaaagaagtcgctatcgtctgcgcgctacgtacgccaatcggcagttttcgcggcgccttatcttccctttccgccgtcgagcttggcgccgccgtagtgcgtggtctgcttgaacgcacgcatctaccggccagcgccgttgacgaactgatttttggccaggtattaaccgccggctgcggacagaatccggcacggcaaaccgtgctgcgcgccgggctaccggttgaaaccccggccgttaccgtcaatctggtttgcggttccgggctgaaagccgtgcaacaggcggtacaggccattcgcagcggcgaggcggagatcgttatcgccggcggccaggagagcatgagcaatgccccatatctggttcagggcgcgcgggatggcctgcgcttcggccatgccagcatgcaggacagtatgattcaggacggattatgggatgcgtttaacgactatcacatgggcatcaccgccgagaatctcgccgacgtctttgacatctcccgccccagcaggatgccttcgctgccctttcgcagcgtaaagccgccgccgcgatagccgccgggcgctttcaggccgagatggtgccgcttagcgtccctcagggtaaaaaagcgccgcgcatggtggacgcagacgaacagccgcgcccggaaaccagcgaacaacagctggcgcagctgcgcccggccttccgcacggaagatggcagcgtcaccgcaggcaatgcctcttcgctcaacgatggtgccgcggcagtcttattgatgagcgtcgataaagcgcggcagcttggcttgccggtgctggcgcggattgtcagttctgcggtggccggcgtcgatccgtccgtaatgggcatcggcccggtaagcgcatgtcggaaggcgctacagcgcgccggttgggcgctggatgaggtggatctcatcgaagccaacgaggcctttgccgtacaggcgctggcggttggcaaattgctggagtgggacagccagaaagtcaacgtcaacggtggcgctatcgcgctaggtcatccgattggcgcctcaggatgtcgcattctggtcagcctgctgcacgagatgcagcgccgcgatgtcagcaaaggcctggcgacgctttgcgtcggcggcggtcagggtatcgcgatgaccatcgaacgttaacaggagccactatgtttacaccacaactggcggtactgggcgctggcctgatgggcgtcggcatcgcctgtcattttgctcgccacggccacgccgtgcgcctctacgacaccgacccggcgcgcattagcgaaattccaggcgtcgccgccgccattttgcgcgagctcgaagagtgccagcagtttgacgctgctcagcgtacggcggtgttctcgcgcctctccggcaccacggcattaggcgatcttgctgacgctaccttgctgatcgaagcgattccggaacgtctgccgctcaagcacgccttataccgcgaactggaaacactgatcggcgacggagccattatcgccagcaacaccagcggactaccgcccgatcggttggcgcagggtatgcggcatccggaacgcttgttgatcgcccacttctggcatccgccgcattttatcccgctggtggaagtggtgccaggcagcgcaaccctgccgcatctggcaaaccaggtcagcgactttttatcttcctgcgcgctggaagcggtggtactcaaccgcgccgcgccgggatttgtcggcaatcgactacagtttgccctgctgcgcgaagcgctgcatatcgttaagagcggcatcgcttcgccggaggtggtcgacaaagtcatgcgcgcctcgcttggccgccgctacgcgatggtcgggccgctggaagccgccgatatgaccggtttagcgacggtccaggatatctgccagcacctgctgccggaactggccacaggcagcgacatgatgtcgctggtcgccgacaaggttgcgcaaggcgctaccggcgcccgcagcgggcaaggtttttaccgctgggatgagacccggcagaaacgaatacagtcgcgccgtgaacatcagctgcgctacgccctgaaaccgtaacttctcgttttgtaccccgacaataacaatgatagtgaggagtcgtaatgagtgtgttgattgccctggccgcgctggcattattgatgctggctgcgtatcgtggatacagcgttatcctgtttgcccctatcgccgcgcttggcgcggtcctgctcaccgacccgagcgcggtaggacctacctttaccggcctgtttatggaaaaaatggtcggttttgtgaagctctattttccggtatttctgctcggcgccgtctttggcaagctaattgaactatcgggcttctcgcgttccatcgtcgccgccgcgattcaaattctcgggcgtcgacatgcgatcccggtgatcgtgctggtctgcgccctgctgacctacggcggcgtttcgctgttcgtggtggcttttgcggtctatccctttgccgccgaactgtttcgccagagcggtatcccgaaacggctgatcccggcaaccgtcgcgctgggtgcgttctctttcactatggatgccctgccgggcaccccgcagattcagaacattatccccaccagcttttttggcaccaacgcctgggccgcccctggcttggattgataggttcactgtttatcatcaccttcggtttactgtggctggaacgacagcggcgtaaagcgctcgcgaatggcgagggttacggtaccgatctgcaaaacgagccgcagacgccggataatatcaatctgccgcatccgctgatcgccattgccccattgctgctggttggcgtgctgaacctgctgtttacccgctggatcccgcaatggtacggcgccagccacgagctaacgctgccagggcttgccaaacccatcgtcaccgaggtcggcaaaatcaccgctatctgggccgtcgaggccgcgctgctatccggcatcgttgtggtgctggtgttcggttttcgcaatattcgcggccgtctggcggaaggcagccgtacggcggtcggcggcgcgatcctcgcggcgatgaataccgcctcggaatatggtttcggcgcggtgattgccgccctgccgggttttctggtgttgtcgaaagcactgaccgccattcccaatcccctgttaaacgaggcgattagcgtgaccgttctggcggggatcaccggctccgcctccggcggaatgagcatcgcgctggcggcaatgtccgataccttcgtggccgccgcccacgccgctaatattccgcttgaggtactccaccgcgtcgcgtcaatggccagcggcggcatggataccctgccgcataacggcgccgtcatcacgctgctggcaatcaccggcttaagtcatcgccaggcatacggcggcattttcgccattacgcttatcaaaagcctcgcggttctgtttgtcattgccgtgttctatttaaccggcattgtctgatgcctgatttaaggagtaacgaaatgaatttgaacggtaaaacagcgctggtcaccggctccaccagcggtattggtttaggcattgccaaagtgctggcgcaggccggcgcgcagctggtgttgaacggttttggcgacagcttgagcgctcgtgccgaggtggcggcgctgggtaaaattcccggctatcacgatgccgacctgcgcgacgtcgggcaaattgaagcgatgatgcgttataccgaaagcgaatttggcggcgtcgatattgtgattaataatgccggtatccagcatgtggcgccggtggagcagttcgcggtggaaaaatggaacgatattctggcgataaatctgtccagcgtcttccacaccagccgactggcgctgccgggcatgcgagagcgcaactgggggcggattattaatattgcctccgtgcatgggttagtcgcctcgaaagagaaatccgcctacgttgccgccaagcatggggtgattggctttagcaaaacgctggcgctggagactgcgcgcaccggcattacctgcaacgcgatttgccccggctgggtactaacgccgctggttcagcagcagatcgataaacgtatcgctgagggggccgaccctgagcaggccagagcgcagttgctggctgaaaaacaaccttccggagaattcgtaacgccgcagcaactgggggaaatggcgctgttcttatgcagcgatgccgccgcgcaggttcgcggcgcggcgtggaatatggatggcggctgggtggcacaataacgggtaacccaacggagaaaaggtcagcgtatctccgttgggtcgtgctatgcgccccgggaattagaacatctccaaaaatcgcttcaccgtgcgcgaacgctcgaagcgccgccaggcgatggcaatatcggtcttgaccggcgtcccttgtatagattgatagctgacgttgggcagcgcgatgcaggtcatcgactgcggcaccaacgcgaaaccaaatccggcgttaaccatactcagcgacgacgaaatctgcgacgactgcctggcgcggttcatatcgataccggcgcgcaggcagctattgaacaccagctcatacaaacccggcgccacttcgcgcgggaaaaggatcggcgcgatgtcccgcaactgttccagcgccagcgtcggttccgctgacaatggattatcgcgcgggagcgcaatgaccattggctcttcatcaatgatacgcaagttaaacgccttactgctttcacacggcaaacggacaaaggcgatatcgatctccgcctcgctcagcgccgccatcaaatttgccatgttgccctcccgttgatggaggatgacgcctgggtgatcgagctgaaaacggtgcagcaacgtgaagatttgtggatggaaagcatcagaactggtaatacctaacgacaggctgccgttcattccgcgggcaatgcccttggccttttccagcgccgcatcgctcagcgcgaggatttggcaggcatcttcataaaaggactccccggcttcggtcagctccacccgcgggttagccgacgcaacagcggagtgcctacctcacgctcaagccgctgaatttgctgacttaacggtggctgtgagatacccagttctttcgctgcccgggtgaagtgccgcgtccgggcgacggcgacaaaatagcgtagataacgaagttccatatcgaaaacgtctcaaaccagcatggtttctatattggaactgtgagctgaatcgggtcaacctttatttaacctttcttatatttgttgaacgaggaagtggctcatgaatcatgctccagattgcacctgcgaagagagtctgtgtgaaacgctacgcgcgttttccgcccagcatcccgatagcgtgctgtatcaaacttcgctgatgagcgccctgctcagcggcgtctacgaaggtaccaccaccattgcggacctgctgaagcacggtgatttcgggctcggcacttttaatgaactcgacggcgagctgatcgcgtttagcagccaggtttatcaactgcgtgccgacggtagcgcgcgtaaagcgcgcccggaacagaaaacgccgtttgcggtgatgacctggtttcagccgcagtaccgtaaaacctttgaccatccggtcagccgccagcagctgcatgaggttattgaccagcaaattccttccgacaatttgttctgcgcgctgcgaatcgatggtcatttccgccacgcccatacccgcaccgtgcctcgtcagacgccgccctaccgggcgatgaccgacgtgctcgacgatcagccggttttccgctttaaccagcgtgacggcgtactggtcggttttcgtaccccgcagcacatgcagggcataaacgtcgccggctatcacgaacacttcattaccgatgatcgccagggcggcggccacctgctggactaccagctcgaccacggggtattgaccttcggcgaaattcataagctgatgatcgaccttcccgccgacagcgcgtttctgcaggccaatctgcatcccgataatctcgatgccgccatccgttcagtagaaagttaggaggttcacatggacaaacagtatccgctgcgccagtgggcgcacggcgccgatctggtcgtcagccaactggaagcgcaaggcgtccgccaggtcttcgggatccccggcgctaaaatcgataaggttttcgactcgttactggactcctcaatccgcattattccagtacgccacgaggccaacgccgcctttatggccgccgcggtcgggcgcattaccggcaaagcgggcgtcgcgctggtgacctccggacccggttgttccaacttgataaccgggatggccaccgctaacagtgaaggcgacccggtggtggcgctgggcggcgcggtcaaacgcgcagataaagccaaacaggtacaccagagtatggacacggtggccatgttcaacccggtcaccaaatatgccgtggaagtgacatcgccggatgcgctggccgaggtggtttccaatgcctttcgcgccgccgagcagggtcgcccgggcagcgccttcgttagtctgccgcaggatgtggtcgatggtccggcgaccggcaaagtgctgcccgccagcagcgctccgcagatgggcgccgcgcctgacgaggcaatcaatcaggtcgcgaaattaatagcccaggcgagaaatccggtgttcctgcttggattaatggccagccagacggaaaacagcgccgcgctgcatcgtttgctggaaaccagccatattccggtcaccagcacctatcaggccgccggggcggtcaatcaggataacttctcgcgcttcgccgggcgcgtcgggctgtttaacaaccaggccggtgaccgcttattgcaactggccgacctggttatctgtatcggctatagcccggtggaatacgaaccggcgatgtggaacaccggcaacgcgacgctggtacatatcgacgtactgcccgcctatgaagagcgtaactacacgccggatgtcgagctggtgggcgatatcgccggcacgctgaacaagctggcgcaaaatatcgatcatcggctggtgctctcgccgcaggctgctgaaatcctccacgaccgacagcatcaacgcgaactgcttgaccgccgcggagcacagttgaatcagtttgccctgcacccgctgcgcatcgttcgcgccatgcaggatatcgtcaacagcgacgttacgctaacggtcgatatggggagcttccatatctggatcgcccgctatctctacagtttccgcgcccgtcaggtgatgatctccaacggtcagcagaccatgggcgtcgccctgccgtgggccatcggggcctggctggtcaatccgcagcgcaaagtggtctcggtctccggcgatggtggttttctgcaatccagcatggagctggaaacggcggtccgcctgaaagccaacatcctgcatcttatctgggtcgataacggctacaacatggtcgcaatccaggaagagaaaaaatatcaacgcctgtccggcgtcgagttcggtcctatggattttaaagcctatgccgaatccttcggcgcgaaagggtttgcggtggaaagcgctgatgcgctggagccgacgcttcgcgcggcgatggatgtcgacggcccggcggtggtcgccatccccgtggattaccgcgataacccgctgctgatgggccagctacacctgagtcagattctttaagtcatcacaaaaggaaatggaaatgaaaaaagtcgcacttgtcaccggcgccggtcagggcattggtaaagctatcgcgttacgcctcgtgaaggacggttttgccgtggcgatcgccgattacaatgacgccactgcaaaagccgtggcggatgaaatcaaccagaacggcggccgggcagtcgcggtcaaagtcgatgtttccgaccgcgagcaggtgtttgccgccgtcgaacaggcgcggaaaacactgggcggattccatgtcatcgtcaacaacgccggggtcgcgccatcaacgcctatcgaatccattacgccggagattgtcgacaaggtgtacaacatcaacgttaaaggggtgatctgggggattcaggcggcggttgacgcctttaaaaaagagggtcacggcggcaaaatcatcaacgcctgttcgcaggccggccacgtcggcaatccggaactggcggtctacagctcaagcaaattcgccgtacgcggtttaacgcaaaccgccgcccgcgacctggcgccgctgggtattaccgttaacggctactgcccagggattgtgaaaacgccgatgtgggccgagatcgatcgtcaggtatccgaagcggctggtaaacctctgggctacggcaccgccgaattcgccaaacgcatcaccctcggccgcctttcggagccagaagatgtcgccgcctgcgtctcttatctcgccagcccggattcagattatatgaccggtcaatcgctgctgatcgatggcggcatggtattcaattaataaaaaataagctctgacatggtttgcccctgcctgttcgcaggggcttttttttgccctgtcacgtctgcattttgcagggtggcggctacaccttacccggcctaccgttggcgcggtcactaccatttgtagccccgctaagcggcagcacgaccggggagcagtgcaggaaaagcaaatatttaccgcgcctgctgctgcgcctgcgccaactgacgggcaatcgcctcgcggcgggcatcgccctccggcaacaacatcagcagctgctgtagcgccgctaccgcctgcggatagtcttcattacgtaccgcgctgagcgccagcatctccagcaccggcaggtttttcggctgccgctgatgcagctcgcgcagcaacagctcgcccatccgcatctgcgcgttatcgcccgcccgcaccagcgcgctggcgtaatcaaaacttgtcgccgggtcatccggcgccagcttatgcgcccgcccgaacgcgccgatcgccgtctcgccatcgtttagcagcaggccaagccgcccaagcagttgccagccggcgaaatcgtcagggctattctgcagatggctgcgcagcccaagccgcagttgagccaactcatccatccgcagcggcgccgcggtcggatctttcgcctgcgccagcaacgcgggataatggcgctcgctctgtcgccacagcagcacctgacccacatcgctggttttcagatacagcccgccgctgaggaagaccaacaatagcgcccccggtagcagcaaccagcggctaagcggccgaacgcgcgtcggttcctgcggcgagatatccgccagtaacgtacgttgcagctcgacgatcatcgcctcattactatcagtacgctcctgctcaagttcgtgcagtcgggactggtacagcgagcggttaatatcattgcgatccgctgctgttttctgttgccgcgaccggcggtaacgggggtcgagcatacagcacagcccacccagcgccatcagtacgccgccataccagatccagcgcacgaacggtttgtagtacagacgtaccgcccaactgccatcatccagctcttctcccagcgcggcgtaaagatcgcgggtaaacccgccgctgatggccgcttcggtcatcatcatccgactggcggtgtaaaagcgtttttcggcatacagcgtggcttccgggcgaccattgcggctgacggcaataacgccctcgccgccgctccagttcggcccgacgatattacgcacgcccttgaaaacgaagtgataatgatgaatatcaaggctgtcgccagcccgcatgcggacatcgcgctcgatgctgtagttctggctaaaagtgatgccaatgacggttaccgccacgccgacatggccgagtaccatgccccactggctgcgcgttaaggtacgcaggccgcgccagaagccgtggcgatgcgtggctcgctcgtggacttcaatcagcgcgaagataagcacccatagcgccatcatcaggccgatgaccgccatcgcggtgatgcggtcctgaagaagccatggcaacgccagagaaagtgacaacgtcacgataagtgatatcgtcagtcgtttaagctgtttacctggctcatcgcggcgccaacgaatcagcggccccagccccagcagcagcgcaaacggtgccatcagcgcggtgaacatggtattgaagaacggttcgccgatcgatatcgtccccagccccaacgctttatgcaccaacggcagcagcgtgcctaacagcaccaccagcatcgcggccatcagcagaatattgttgccaagcaggaacgactcgcgcgaccagagcgtatgttccactcgcgcccgcactcgcccacctttcaccgcatacagcagcagcgagccgccaatcgcgagggtcaacaaggccagtataaacatcccgcgcgccggatcggaggcaaaggagtgcaccgataccagcacgccggatcgcacaagaaaagtccccagcaggcacagcgagaaagccgccagcgccagcagcaccgtccaggcacgaaagctgccgcgcttttctgtcaccgccagcgaatgcagcaacgcggtgccgaccagccacggcataaacgaggcgttttccaccgggtcccagaaccaccaaccgccccagcccagttcgtaataggcccacgccgagcccagcacgatcccaagagtcaggaacatccacgccgcctgcgtccacgggcgcgaccatcgcgcccacgcggtatccagccgccccgccagcagcgaggcaatcgcgaaggcgaaggccaccgagaagccaacatagcccatgtaaaggatcggtggatgaaaaatcatcccgatatcctgcagcataggattgagatcgcgaccatctacgggatacagcggcaggctacggctgaacggattggaggtaaacaggataaatagcaggaagccgaaggcgatcatccccattaccgccagcacccgcgccaccgcgtcaggcggcatctggcgactgaagagcgcgacggcgaacgtccacacgctgagcagcagcacccacagcagcaaagagccttcgtgcgctccccaggtggccgccaccctgtaccacaccggcagcgcgctgttggagttttccgccacatagcgcacggtgaagtcattgattacaaaggcatgcaccagcagcgcaaacgcgccgatgatgcagataaacagcgcgcaggccagcggccgggctaatgccatcagccatcgttcctggcgcgctgcgccccatagcggaaagatacttagcagcagcgccagccctgccgccagacacagcaggtagttgcccagttccggcatcatggctgtgtcccctgttgttcaggtgtcatcacgttttttacctcaggcggggcgaatccagtgccccgccccggcccagttactctgcagcagccggcagtttcgagacgtcggcgttacctaacgccttctcatcgcgaatcatcgacttatcttttcgtactttcgccacatcgctggcgctcaccggcggcgcgttgttgccccaactggtgcggatgaagttgaccacatccgcgacttgttgatcgtcaagacgccagccgaatgacggcatggtcaggttcgagaccgcatccttcaccgccggcgtggtgttgccggtcagaatgatgtgaatcagcgaggtcgcatcttcggtctgtaccaccgggttgcctttcaacgacgggaacgcgcgtttataaccgacgccatcggtacggtggcaggcggcacagttatcgacgtacagcgccgcgccggttttgctgtcatcgcctttccacagatctttcgccacgctatcttccaccggagctggcgtctgtttaccgccgcgcggcggtagcgacttcagatagcgggcaatagcggtgatatcgtcgttcgagagatactgcaggctgtgctcaaccacgtcgctcatgccgccgaagaccacggatttgtcattgcgcccggttttcaggaactcggccagctcggcctcgctccagctccccagaccgtcgcgattttcaccgcgcaggctggaggctacccaaccgtcaatcggcgcattgctacccgccaggtaatcatcgccttcactttcgctaagcgctttttcctgcatcgtcaggctacgcggggtgtggcaggcgccgcagtggccgagcccttccacgagataacggccgcgctccagtaccggatccacctgcggattggcgacaaagtcgctcggagtcggagcgaagatgccgcgccagaacgccagcggccagcgcatcgacagcggccacgggatgtccgtgtctttgttggcgacgttaaccggctccacgccgtgcataaagtaggcgtacatggcacgcatatccgcttcgttgatacgggcgaaggaaggatacggcatcgccggatagagcgttgagccgtctttacgcacgcctttacgcaccgcgtcgtcaaactcttcgaaggtataaccgccaataccgtgcgctttgtccggcgtgatgttggtggaataaatggtgccaatcggcgtttccatcggcagaccaccggcaaaaggtttgccctctttaccgttggtgtggcaggccacgcaatcgccggcgcgcgccagatattcgccctgcttaatcagattgctgtccgcaggtgcctcttcggcgaacgccgcacagcttaacgcaccgagaaccagtgccgataaccattgcattttcatgatttgctttcccttatgcctgcaccaatggacccggatttctcaggtactgttcgcggatagccttcgccgaccagtaggccagcgcggcaacggtacccgtcgggttgtagcccagcccctgcgggaaagcggaagcgccgatgacgaagacgttatgcacgtcccagctctgtagataacggttcaccgcgctggtcttcggatcttcgcccatcaccgcgccgccgttcatatgggtggtctggtagctggtggtgtcaaagtggctattggcgtttttcgggctgccgagcatatatttcggcttcatcgctttggcgatcggcgccatcttatcgaacataaactgcgccatcttgatgtcgttttcctgccagtcgaaggtcatgcgcagcagcggctgaccaaagacgtttttgtagttcggatcgagatcgagatagttctggcgataggactgatgcgcgccgtgggcatccatcgacaggtggtgcgtgtaggtgtcggccaccgccgatttccatttactgccccacgccggggtacccggaggcaccggcacgccggagataggtttagtccccgcctggttgacccagaacggcgaaccgccgacgaagcccgccgcgccgtgatcgaagttatcggcattgaagtcatcgacgccgacgccgttgccgcccgcgccgatgaacgggttggtgaaggtatctttatcgaaaatggccttgatagtggtcatgttctgataggcgaagttacgcccgaccaccccttcgccagtctcaggattgtacggtttaccgatcccggaaagcagcatcagatgcacgttatggaactggaaggcgccgataatcaccagatccgccggctgttccatttcacggccctgaccgtcgacataggtcacaccggtggcgcgggatttatcgtcggtcagattgaccttcagcacattggcgttggtacgcagttcaaagcgtttttcctggcgcagcgccggaaggatgttcacgttcggcgaggctttcgaatacatgtagcaggcgtagccactgcagaaaccgcagaagttacacggccccatctgcgcgccatacgggttggtataggagtcggaggtgtttgcggaaggcaggttatagggatgatagcccacttccagcgccgctttttcaaacagctgcgccgaccaggtatttttctgcgccggcagcgggaaatcgtccgagcgatccggcgcgaaggcgttaccgccgcggcctttaccgacaaccttccctttaaccgaccaggcggtaccggaggtgccaaagactttttccgctttgtcgaagaacggttccagttcgtcgtaggtgacgccgaaatcctggatgatcatatcctggggaatgaagtttttgccgtagcgctcttcatagtggctgcgcatacgcagttcgatcggatcgacgcggaaatgcacgcctgaccagtgcaaacccgcgccgccaacaccggtacccggcaggaaggcggccagttggcgatagggtaccgcctgctggctggtgttgtgacgaatcgtcaccgtgcttttagagagatcctggaacagcttgcggcggatgttataggtcagttcatcgataacctgtggataagcgccgtccggccaggtatcgcgcatcggaccgcgttccagcgcgacgacgttgagccccgcttccgtcagctctttggccatgatcgcgccaacccagccgaagccaacgatcgctacatcggtttttttcaatacggtcgccatgattacgccctctccccattaattgataccggcgggaagggatagcgttcgcctcgttcaacccagtccataaagtcggcgcgcgcgccgggaaaattaatcagcgtccagccgaccatgcctttattaccgccatggatagggtcgctaaagaagccttcgcgggtgttttgtagcagataggagaaaaacagcgaggccggcagctgtttgaactgcgccttgccggattcccacagaccgagcgcctcatcctgctgttcgccgctcagttcagcaaagctcttgtgatactggttttgacaccactcttcggcatcggcgataccgaggttataaatctgttttggtaccagcggcagctggtagcccatctctttcggcacgtcggggttaaatggcccctgcatataccagatggaaccggtggcataaggggtgttgagctggcggtcgataaactccggcacaccggcctctttggcaccgggaccgagttcatcggccgggattaagcgagcgacggcggcgttgataaacagccactcgcgatcgttgaagaattgcggcttccagtcgctggatgccgcgttgccaccggctgagggtgcggaggccgcctgtgccgtggcgctcgccgccacgccaatggcgcccacgctgccgccgccgatgactaccgttggaatcaaggccattgattttactaaaaaatcacgccttgaattgttggttttctcgctcgacataatcacattcctgtcaattaaaaatactgttttgtcgcttacaagcccagcaaatcccgctctggtaccgataccatgcagctgtcgcgaaacagaccgtctggctttggccaataagacgtacaataaatcgccaatagcgataagatttatagggttatcgtttggatattagacgattctcaacgcaacgcgggaaaatggcgcaaatattcaccgggttgtcacgataagatcgggcatttaataacctgagtgcggtaagtcatgcggaaatttcgcgcctttggttttaccaaagcgccaataaagggtgatatgtatcacatttgttattttttgtttatggtacatggcagattaagcacctgtaaatactcgcttaatgaataattaaacaattcgagctgttaaattagttaatcaccgttgttaattaaatcgatgctgcttcccttatcaatttaacgacacggtgatgtcgtacagatattcccaaccacaaggagaatttatgttcgatcatgtcaaatttggcgtcagtgattatgccgcgagcaaggcattctttttacaggcgctggcgccgctcggcgtgacgctggcaggcgaaggcgagccggcttacggcgcggagctagccggggcgaacgatgcctctttatgcctctatcaaagcgaagataaacccgcgccgctgcatatcgccttttgcgccgacagccgcgagcaggttgacgctttctggcacgcggcgctggccgccggaggcaaggataacggcgcgccgggattacggcctaattaccacgccaattactacgccgcctttgtcattgcgccagatggacacaatatcgaagcggtgtgtcatctggcgccctgagcaaagtttatcgctgcggaaaaatccacacatcatccgcgggcagcgtcaggtgacaatgttcggcgtcacgcagggccgtgccgtaggcgcgaatcgcaaagtcatcgccctcggtgcggaacagatattcccaccgatcgccgaggtacatgctggtcagcagcggaagttccaggctgttatcctgcggcgagcagtcaaggcgcagccgttcgacgcggatcaccgccgtcgccggctgaccgacgctgaccccctcgcccgcgcggccccatagcgcccagctggcgccttcaacccgcgcgcgtccgttctccagggccgtcaccttaccgtgcagacggttattgctgcccataaactcggcggcgaacagggtggccggattgccgtacatctcctgcggcgtcccctgctgttcaatcacgccgttgttaagcagcaaaatgcgatcggagatcgccatcgcttcattctgatcgtgggtgaccatcagcgccgacaggcccaacttgataatgagctcgcgcaggaatacccgcgcctcttcgcgcagcttggcgtcgaggttggatagcggctcatccagcagaataaccggcgggttatagaccagcgcccgtcctatcgccactcgctgctgctggccgccggaaagctggtgcgggtgtcggttgcccagatgtcccagacctagctgctcgagtacgctctgcacccgctgtttaatctcgccgctggccaccttacgcagtttcagcggataggccacgttgtcgaataccgttttatgcggccacagggcgtaggactggaacaccagcccgagattacgctcctccgccgggatctcgctacgcggactgccgtcataaaccacgttattgccgatggtgatccgcccggcggtcggtttctccagcccggcgaccgcgcgtagcagagtggttttcccgctgcctgaagggccgagcagcgacaccacttccccgcgtttaagctccatcgacacccctttcagcaccgggttgtcgccataggtcagatgcaaattgtctaccgataactcaatcatgtaatttcactccaaagcgcagggcgatacccagaccgactaccaccaacagaatattgataaacgatagcgccgcgacgatatcaatggcgcccgccgcccacagagagaccagcatcgaaccgatcgtttcggtgcctggtgacagcaaataaacgccggttgaatattcacgttcaaagatcaggaacatcagcagccaggagccgataagcccgtagcgtgccagcggaacggtgacgtggcgggtgatttgcccgcgagaggcgccggtgctgcgcgcagcctcctccagctctggcgccacctgcaggagcgttgatgagataaggcgcaggccgtaggccatccacaccaccgtataggccaaccagacgctgaaaatggtgttgcgcagcgcgcgcaattgcacgataaggtgttcgcgcaaccagtcggcgaccggcagcgccgagagccagccatttttcaatgactgatcgagccacattggcacaaacagaaacacccacagaaacgccagaccggccaacaggcccggcaccgcgcgcggtaccagcacgctgtagtcgagaaaacgcgtcacgttatccggcttgcggtgcatggcgataccgacaaacagatagcacaccaccgccagcgcgccgccaataatcccgatcgccatcgagttgacgatcgcccgcagcaggttcggctgctgccagatgttgcggaaagtcgccagcgacagctcatcccatagtgaaacgccaacgccccagttggaaataaaggcccgtagcgccacacccagtagcgggacgccgatggtcaccgtcagccacgccaccacgaccgcgcccgcgacccaacgccatttccccagcggcaaggcgcgcgactgcgacgctttacctttcatggtcacgaagcgattggcggtacgcatcaaccggcgctgcaacatcaccaacggaatggtaatgcagattaacaccaccgcgaccgccgccatcagatggtaagaaggcgttcccagtttattggtcaacttatagagataggtcgccagcaccatgttgccctccggatcgccgagcaccagcatcaggccaaagacctcaaggccgaggaagaacagcagcacgcaggcgtagagaatggacggccttaccatcggcaggctcaccgaggtcatcacctgcagcggcgtggcgccgacggtacgcgccgcctcttccacatccgaaccgacgctacgtagcgccgaggagatataaagataggcatgcgggacgtgcgttaaaccggcgattactacgatgctgaacatcgaatagatattccacggcacaaaaccaagccacgcctgcgcccactgcgacaggaaaccgaccggcccggctgccaccacgtaaccaaagcccaacaccatcggcgagacaaaaatcggcaccaggatcagcggctcaataaagcgtctgccgggtaaatcggtgcgaaccattaaaaaggccagaataccgcccagcggaattgcgataatgaccagaccaaaggcgagaataaatccggagcgtaaagccagataaaaatccgggtcggtaaaaataaagccgaaggcttcgaggctccactcttttgagcgggcaaaaaatggcgcggaaagaaagctttgcgccacgataaataatagtggaacgtaaatcactagcgccgcaatcaataccaccatgccacgcggtaacccctgccactttctgcgtaaaatgttcatctttaattcccctggcaaagtacagagataaatgatcaagaagagatatgagtacttatttactaaacactgaaacgatcatcccccggatacattccggagggatgttcacatgccaaaactttatttcgcagcggcggcgcgccattgcttaataaattccagacgctgtttaggttgcagatattgcaacaggctttcatctaccggaatcggcttcagcgcattgcccagtaatttcgtcattccgtcgatatcatttttaccttcaatgtcgttgcgaattgacgggatatcgccctgagaggcaagaatcgtttgccctttttccgacagtacatagtcgaaccaaagtttcgccgcattaggatgccctgcttccgcggtgataaatgagacgcgggacagcaccagcacgtagtctttcggataggcgatgcctaatgacgggtcggttttagcgcgcgcttcggcataggagcccagaatgttatagccgatcaggttttcaccggaggagacgcgctccatcatggtgccggtagaggattgcaccgtcaggccgcctttggcgatattcgccaggtctgcaaagtaattgccgtcagccttgctatcctgcaccgccagcataaaaccaagcccggatttctcgatatcgtaggtggtgactttgcctttaaatttatcagcctgcccggcgataagtttggccaatgcggtatgtgaatccggcacttcattttgcgggatcagccgtttgttatagataaagaccaccggctcataggttgtgccataggctttttgctgccagaccgcccatttcggcagcttgccgacttccggcgaggcatactcttgcgcataatcggtggctaatttcagcgccgtgtccatcgaagagctccacaccacgtcgccgctaccgccgccggcggcttgttcactaatataacggttgtacagctcggtgctgttcatatcgttatattcaactttaatcccaggatattgcgcttcaaagcctttaattaacggccctgccgctttggtgtccgttgtggaataaaccacgactttgccctctttcaccccggcatcaacgactttttgataatctgccgggtagccctgcgggacctccgccagcgcggagtacgagaagactgtcgtcagtgaaaccactaaaccaccgattttcttatacataaaatcaacccttaagcatcaataattaaacacaaatttaacatatagtgctgtaacaacctctgcaacgctggggatgggttttttatggcttttgtgacagtggtgtagtttaaaaagtggtgtttatggagtttattcagcgagtagtgaaaacagcgagcgaggtcacagattaatgccgcagcgtcacgaagcgattaccgccaatggcaaagcctttatttgcatttcttcaggaccattcgaataaagaaaaaaagggcagtgtcattaccaggatggaataataaatggaccttctacatatttatctcatattacattcaaaaccattttgccgggcggtttcgtcaaaatgaaccatgccaataatctccctattcagtgagagatatttatcgccttgatcttctgcgccttgcggcgcagcatggaacggcaaacgcaacaaaacaacaacatacatcgaggagactatccgtgcctacaggacatcgctttcgccccacggagctacaccacttcgtcaccaccctgttcacgcagttgggcagtacgccaaccgaagccgcgctggtcgcagaccacctgatcgccgccaaccttgccggacacgattcgcacggcgtcggcatgatcccgagttacgtaaaatcccatggcgaaggatttttgcaacttaaccgtcatgccagcgtaatgaaagacgccggcgccgtcgtcactcttgacggtaacgccggcttcggtcaggtcgttgcccatgaagccatgcagttggggattgaaaaagccaaacagcacggcctcgccgcggtagcgctgcgcaatgctcaccatattgggcgcatcggttactgggcggagcagtgtgcggcgcaggggttaatatccattcatttcgtcagcgtcgtcggcgatccgatggtggcgccatttcgcggcaaagatagtcgcttcggcactaacccgctctgcgtggtcttcccgcgtgaaggccacccgccgctgctgctcgattacgccaccagcgccatcgcttttggcaaaacccgcgtcgcgtggcataaaggcgaagcggtgccagccggctcattgattgactatcgcggcgaaccgaccaccaatccggcggtgatgcagacctcaccgcttggcgccctgctcacctttgcccaacataaaggctatgccctggcgacgctgtgcgaggtgctcggcggcgcggtctcgggtgggcaaaccacccatcaggacagcctgcagagctgcgtcgacgccatcttcaactgcatgaccaccattattctcagccccgaagccttcgatgcgccgcagatgcagcgcgaaaccgaggcctttatcgactggtgtaaacagtcgccgcacgatgccgatacacctattctggcgccgggtgagtgggaagcagccaatcatcagcagcggctggcaaacggtattccgctcgatgccagtagctggcaggcgatctgcgccgccgcgcggcaggccgggatgtcgcaggagacgttgaaccaactgcagcagaacatggaagtcaacgcttaacctcaatccccgcggggcgatcgtcagccacggcgtcccgcgtcatcgtcacttatgacgacttccatgattttcccgcgtcttcatcaccttcatcccgcgtcatccgcgctatcttcactttggcacgcattatgcaatcgatttgcatcgcaagacgatcgacgtcgcgcgtttgctgacggtagcctgccgggcccggcgcgctatcgccctatcttcactgttaacaggtctgttactgatgaataaaattaccagcgtgtgcccctattgcggggcgggttgtaaactcaaattggttgtcgaaaatgataaaatcattcgcgccgaggccgccgacggcgtcaccaatcaaaaccagctatgcctgaaaggctactacggctgggatttcctcaatgacacgcagcttctcacgcctcgcctcaagcaaccgatgattcgttatcagaaaggcggcccgttcaccccggtcagctgggaagaagcgattcgctacaccgccgctaagctcagcgagatcaaagccaagtacgggccgcgagccatcatgaccaccggatcgtcccgcggcaccggtaacgaaaccaactatgtgatgcagaaattcgcccgagcggtactcaataccaataacgtcgactgttgcgcccgcgtttgccacgggccgtcggtcgccgggctgcaggcttcactcggcaatggcgcgatgagcaactcgataagcgatatcgagaactcaaaatgcctgctggtctttggctacaactgcgccgattctcaccctatcgtggcgcgacgggtgctcaaagcccgcgataacggcgcgaaaatcatcgtctgcgatccgcgacgcattgaaaccgcccgcatcgccgaccagcatctgcaactcaacaacggcagcaatatggcgctggtcaacgccttcgcccacgtcctgctggaggaagatctctacaaccacgattacgttgagcgttataccgaagggctggaggcctaccgcgaagcggtgaaagactactctcccgaagccgtggaagcactggtcggcgtcccggcgctggctatccggcgggcgatgcgcaccttcgccgccgcccttccgccaccattatgtggggaatgggcgtaacccaattcggccaggcggttgatgtcgttcgtggtctcgccagcctcgcgctgctgaccggtaacctcggaaagcctaacgtcggcgtcggcccggttcgcggacaaaataacgttcagggcgcctgcgacatgggggtgttacccaaccagttcccgggctatcaggatgtcaccgacgccgcggtgcgcgccaaattcgccaatgcctggggcatcgatccggcgatgatggatacgcaaatcggcactcgtatcaccgaagtcccgcataaagcgctggcgggagaaatcaaagcctactacatcatgggcgaggatccgctgcaaaccgaggctgacctgggtctggtacgcaaagggatggaggcgctggatttcgtggtggtgcaggatatctttatgaccaaaacggcggaagtggctgacgtactgctgccggcgacgtcctggggcgagcacggcggcgtctttacctgcgccgaccgcggcttccagcgtttcgagcaggctatttctcccacaggtaacgtgaaacgcgattgggaaattatcagcctgctggctagcgagatgggctatccgatgcattacgccagtaaccagcaaatctgggatgagatgcgtgaactctgcccgctgttctacggcgtaacctgggagaaaatgggcgatatgggccacctgcagtggccgtgcccgacgctcgatcaccccggtacgccgtggttgtatcaggataatcactttgataccccatcgggcaaagggcaactgttcgccgcgccgtggcgcgcgccggcagaaacgccggacgatgatttcccgctggtgctctgcacggtgcgcgaagtcggacattactcctgccgttcaatgaccggcaactgcgccgcgctgcagtcgctggcggacgaaccgggccggatccagatgcaccctgccgatgccgagcgggcaggtattgccgatcgtcagctggtttgggtgagttcgcggcgcggcaaagtgatgactcgcgccgatctcagcgagcgtatcaaccccggcgcggtgtacatgacctaccagtggtgggtcggcgcctgtaatgagctgacccaggataatctggatcctatctcgaaaacgccggaaaccaagtactgcgcggtgaaggtcgaggccattgccgaccaggactgggcggaacggtacgcctggacgacctatagtttgatgaaagcgcggttaaaggcggcggctaacgcctgagggtgaattcaggggaggcttagcttctccctggaatctgacgctgtctggattgacatcaaaataggccttctttggcaggacgactttgtgaaaatcttttgtatcgctcagggacctgccagcagggactgaagtatatagccgcccaccagccctgtggcgccagcaagcaggactttccgttgttcggtaagtttagacatggtgtgtttttcctcaattcaagcgcatggcatgacggacgctgtcaggtgtttttccagtccacccctggaatgcgcgataaaaggaattgggatcttcgaatccaaggaggaaagcgatctctgcgccggacatcgtggtatttgccagataatgtcgggcaaggctctcccgcaccatattgaccagggcgcgaaagttttcccctcctcctcaagccgacgttgaagcgtacgcttgctcaaacccagtcgttccgcggccttctcaatggtagccgcgttaccaggcaacagctccagtaagacagcacgcacgcgttccgccgtcgacgctgtcgaatcaagttcactgagccgtcgacgaagatcgggttcgaacgcgtgaaacatgctttcgttgaccgtcaggaatggacgcaaagcatccacagcggcgaaagcgattgctggatactctcccttttgcacaggtacgccgaagaaattctcgtaacgccggagataacgactggacggaagttccggcaggataacgcgatgcgccttaatgtgctcacgggtagccagtctggctagtcgcacgaaaaacgcaatctcagccacttgcagcgagtgaggtaccgcggtttgtatcgacaaccagcgaggcgtcacgaccagctcgcctgcgtcacccgtattgacttccaggctcatgggcgccacaagttgcttgtatttggcgaggcgctgcatagcctgtaccagattcgtgctacacagggcagcgaacagcggtgggttgaaagaatcagccgagagagtctcgacgaggcgtaagggaaacatggcatcacttgcctcagcctctaaagcgcgccagaaacgaaaatagtcttcgccagaaagcccctgtcttgtacgggagagtaaatcgtctggaaggccggcccgacgtaatacatggccaggctgaacacctaagtccttcagtattgccagccagccaatatccatgggaaaagttttgttttgcaccttcagcactccgtcactattgctcattcaaccgacgctcagagtatagagcagtcgtgcgcttaacccccgtcaaaccgcgccacaatgactgcacgttgcgccaacctgtaacatccgcgactcactccctgtgctggcatctctcgcattaaaattggcgcggattgccagagcgttgtcgcggcttgcttcctatagtgagatgaaaacatcacaccagccaggacacgttccaccagtcctgacagtccaatctgaacaatagagaaatcccaatgaatgctaccgaagctatcgaccaactggatccccaaaaatggactacaacatctcccgcagaacgtttgcatctgctggaggaaatccgtgcaaacctgaagaagtacggtgatgacctcgccttcgccgacagcaagatgaagaatggcatcctcggtgcgcctcttttttcatacccaatgtcaaaggttgctaccgtcgttcctatggcgagtaccgtctcggcagccatcatcctttatgaatccattctcgacggcaagatgccacagccgctgagcgtggaaaaagtgagtgaggatctctacgacatttatgtctttccgcaggagcggaaggacaagttgatgtacgcggatcagaagagtcgcatccgtgtgaaaggcgcaccgaaacaaatcaatccgatggaaaagcccgcgggtattattgccgtgctgggtgccggcaactacagctcagcgctcgaggtgttgaaagcgatcttcttcgagaactgtacagtcgtacacaaaccgcatcacctgaacgaagaaaccgacaggatttgggcgaagatcatgcagccgctgatcgatcggcgcgttctgagcttctgcgatgccgatcggggacaagacctgacagtagatccccgcctctcccggatctactttacaggtggaaccgcaacggccgaggctatcatgtcagcgacagagacgccgcttatctccgaatgcggcggcaataacccgtgcatcatcgtgccgggcgaccagccatggacaaagaaggaaattgagcatcaggcagtgcagatagccaccatggcaaagttcaatggtggcgcgaactgcggtcgtccccagactctggtgacaagcaaacactggccgcagcgcaaggaattcctcgacgcgctgcgggtcgctatctcggagactactccggccatgggtatgtactaccccggcgccgacaaggtcgtggatggttttcgacaggcctatcccgatgcggaagtactgagccccgagggcggcaagtatccgcattccgacgtcatattactaacagacgttgagcccggtggctacgccacttcacatgaagcgttcagcctggtgctcgctgaggtgccgctagacctgccagccaatgccgcgcacttcctccccggcgccgtcaagttcgccaacacccagctcctgggcacgctcgccagtgcgatacttatcgatgaggacaccagaaaggcccatcagaaattactcgagcaagcggtgtctgacctggaatatggtgcggtcgccatcaacagcatgccgtccttcatttttctcaacccctatcttacctggggtggaaatgaggcaggcaagacgttcatttctggtcgcggcaactttggcaacctactcaattatgagaacgttgagaaatcgatcatggaggcaaagtttatgtcaccagggcacatgctgtacaccaacaagcgagcattcgacaatatggctggaaacatggcgaatttcgcagtcgagcctacctggatgaacctgacctgtctgatgggggacgccatccgcgatagcttccgtaaaaaagatttctgagtcagtagaacgcatcggcctgaaaggccttatccattgccctttactcgactatcttgtagcgagtctgcttcatagccggggcagtgactacgaccttgaggacatgcatagggtgagctccacaacaataaatcgaaactcatcgcggctttccatacgctcgaacggcttgtacgccagttcgagcgctatcaggccagagccggtcgtggcattctgcgcctgaaagtgagtctagcaacgatagacatggcgacataatcactattgtgaatttaattacaccatagtaaattaatgggattgtttttgtaggtaattaccccaaaccatgtccactttaaggaaaataaaatgataaaaatcagaatgtcacgaccttctgaagcggaagacatcatccagatttggaaaagttctgtagatgctacgcacgattttctgacaacacatgaccggcaagagatcgaaaaagaggtggtcggctttttttcggaaacccctgtatgggtagcgacaaatgatgaagagcttccactcggatttatgtttttacatgatggtcatctggaggcactgttcgtagatgctgctgctcgcgggcttggcgtcggcaaccagttgatatcccatgcccttgctcttcatcctgatttaagcgtcgacgtcaatgaacaaaaccagcaggccgtcgggttttatcaacatttgggcttccaggtttcagggcgctccgggcaggatagtcagggaagaccttatcccctgctgcacctgcgtaaagggaatggcgtctaaccgtttgccaggggaactatcatctgtttttttggctaaacgcaacgatgtatgtacagctctgttcgctatccgggttagtcatttggcactcgcctgcaaaagtaagagcaagacaatcacccgcttgcaaatgatgagtctgatgattgaccctaaaatcaaggttgccgctcagcatccaaagtgtttgcccgcaaagatgctcaatagcggaggcggggatcgtcagttgacccattgcagggatttcaacttttatcagttccggactggcgcccgccggggacaatgtccaacgaataatgcctgattgttcatctgtccaatgctgctgctggtgagcgaaacgaaccagcgaattctgatgttgctcaagctcggcgaaaagttttgatagcgtaatattcatggcgttcgctaaacgactgaggatagtcgcgctggggctggagacgcctcgttcaatcttactaatcatcgcctggctcacacctgagcgttgagcaagctccgttaccgtccagttacgagctttcctgtgctttagtaataactgtgcaatgtcgctatctactatctgatttttcgctgttttatccattttcaccctcactttcgccagcctgattatgccattacctcaattaggctggaatcattgattgggtcagtgtgaaaaagtcaggtttcaatggatggacaattatctttagcacccacgtcatcagaagagcatgagtttgcgatgcgcactcctggcacaacgcgggtaagttaatccgagttcttcgtttcatagcaacgtcccccttgattaaggatagcgttgcatcgacccgttgaactcacagcaaggagtgaacattgtgcttaaataatgatgactctggcaggatgggttttcaatgcctggaaggtagccactaattcaggtgacgtaaatgtgtagcaatcccccactttaggccaatacattttccattaatcaggtcgataacagaataacttgcattgggatgagcatagcgagggaaactatcgacagtcccttctttaagaattgccagagtgccctgactgacatgcccgtgagacacaatacatattgtttgttgatgtgatgaggtatcttccaggttttgtaaaaaacgcataactcgctgagaagcatgcgccagtgactctccccctggtggacaatactctgcatcaagcctgaataatgcatttgcatagtttggatgtttttgtctgagtagttctaacggcataccttcaaactgaccaaaggcctgctctttaagggccggttcagccgtcagtgaacaatgaaagtgttcagccaggctttgccccatttgccaggcacgcccaagcggagaagcgtaaacacgctctatttgatactcacttgcactaaacgctgctagtaggacggatgtttcacgcaaaccccgacaggtcaaggagctatcgctgtgcccctgaataattccttcccaattccactctgtttctgcgtgtcgaacaagtatcaatttcatcgttagctgaccatgctcgttgttgatcaaaatgtcccaactgcgcgatgtcaaacacacaccgttgaagcagcggaaggctttcctgttgtggaaataatgaacaagtgtcgcttattgccgttatgcagcggctctgggtgtggggcgctgaattttatccgtagttaacttccgcttttggcacggagcggacgtgttaatgaagctgaaggtccgctgggagcgcttagcggacatgccatcagcttatcagccacctttacgagcattccattcatcacgtgtgatttcccatagctcggaatccagcagaccgctgacatatgctttcttttcagtcctaatgagccgcatgccactgctttgtgagatacgtttggagcggttattgagagccgctttcggcgcacgcaatatagtcttatttaaggaattgaaccaataatctgtagctgcgttacaggcctcacgcataaaacctttgccctgatgctccggtgctaaccaaaatcctcggttgttatcctcaacatcataaagacagattaaacctaccatgttgtcaggtgtttcacgatgcctaatagtccagatccaagcgattccatttgctatatcaggcaaggcaacgttattgacataattctcggcgccattatccggatagggccacggtactgatgagaccatgtaccgaacaatctcccagcgaggataaagtatctgaatttgtgaggcatcttctgaggataatggttttaacagtaagcgttctgtatagagtataggtattggcatcagcacttttccttcctgaacttagtgtctattactgtttaagccattaaataactatctcaatgtatcttgatgtacagaaaatatccatacaataggaggcgcggttaacaagcagtcaggggcagtttttggcactgcgcggatgaaccaactgagtttaagctccagtctgagcgaagagcaaaccacactatctgaggtaacgtattactgttaatggtgaacccattaacgctaatactattattactttttttcatcaacggttaggcagatgcattaatggttaagcttaaggaaatagaaatgaaatatccaggcgcaggggcctggcaaatgggagacagtccagaactggcaagcgagcttgctaaccttattaaaaaaggaatcaaaacggcctcttgtggatcttttgcctcttaccaacaggaagaatctgctccgaggattggcagctataacataattcttgatggacagaatgtcccggtatgcgtgatccggctggtttcgctacaattggtgcgtttttgcgatattaatgaggagttcgctcgcaaagagggtgaaggcgatttaagtcttgaatactggaagatagagcatcagcgatttttcatccgtgaaggtcatttttctgaggatatggagttgatcgcagaagaattcgaagtggttgaggtgctgtaatcggagataaaattgctgatgtttatctatcacccttttcataaacgtccgctcctggcacgaagcggtcagcatgcaggatcaccagtactgtaatgacaaaagaagatgttgtcctctaacgaatgcaggatttattctctgcctttcttattcgaagtaatataacgtgtggtttgattgacattactggaggtataacatgttggtttataatgtctttggtcgataccttggcattctgcgtaagaatgagtgctggttggtttttcgagtagatctgacagaaagaaagtattcccgtatctatgacgttgttattccagatgatctggcagaagatgaaattgcaggctggttagatgatattttccatgaagctgcaaccgaacgtcatccagatgttaaacacatcgaataattaattgatcaaattatcaatatccgcttctggcgcgacgcggactgcctgaatagccgtacgatctctatgaatgaaaggtggagtttagcttctcgggcctgtttatacacaatcgggctggctgtattgtaacgtccgaaaaatctggtaaaacattgctacacaaattctttactatcaagattcgtgaaggccgtattgaaccggccttatgtgattttcagactgaattactgacccgagaaaatcgaagccggaacaagcggcacggagctcaacttattaacgaaccttcaggttgagaatggaggttatgggtgcttgccctcttccagcaggccatttaccagcagggtgaaaacctgaatcgcttttggtaaagcatgctgcggatcttcactggcagccacccactgagcggcattcagtgcagctccatttaacagccaggcggtagcatccacatctaccggcttgattaagccgcgttcaatcagatctgaaatgttctctcgggtggcgtcaaggcagtaattctgactcggccatttcgtaggatcgccaagaaaagccgggccatcaagcagaacgatacgccggacttcttcatccagagccattctgatataggctatcccttcagccagaagcttttgctggtcatccctgaactgtgtcgctgcactcttggcactttgtgccatttctgagtcaatctgggcaaccacagcggcaagcaacccttttttgtccccaaaattatggtacagagccccacgcgtcaggccaacgctggcagtcaaatcatccattgatgctgctgcaaaccctttttcggcaaaggcttttcgtgcggctgtaatcaacttcgtgcgggtttcttccatcgtttcggcgcggcgtttggcagccatgcggactccttgcaatatacgcagcgtatgaaatttgacatacgccgcgtatgtgtggttaagtttacatacactgcgtatattaattgatttatttatgtcacgcacggcttcacacatccgaaaaaaggatacgttatgaaccaaccgaaacctgttttcccggcgaatcgccacgctctctatgagaagcatggttattctgctgcgatccgctctggtgatttactgtttgtatccggtcaggtgggtagccgggaagatggtagtcctgagcccgactttgcaacgcaggtagaacgtgcctttgaaaacctcaaggccactcttaccgccgcaggatgttcgtttgaagatcttatcgatgtgacaacctttcataccgatccggagagtcagttttcaaccattatgcaggtgaaacaaaccgtttttccgaagccgccatatcccaactggacagccgtgggggttaactggctggcgggatttgattttgagataaaggttatcgcccggattccggaacatcagctttaaaaacttcacacacagatatcaggaggcctgatatctgtgtgtaaatctgtttttgacacaaaagtggctcgataaaacctaggttaaaaagttaaattattcgcctggatcaaggttaaactgtaaagggtagtccatacaagccggctccttcacctgcctgtttcccatgccatgttgcctgtgtgccatcctctccattacctgatattgctgatgcctggccgccgttgcacatgcgtggttcggaagaatccgtatccattttaattcaacacacttttgagagcttgttaaatacctcagggcatgaagcgggcattttaacatttaaaattctcttaccttacgttacctaaaccccgatcgctctccacaccttgaagcattagcgtcgcttcttcgacacgaataaagcgcccgtcatcatctgtttcagcgaacatataaacttccatatccacctcttcaccattgtgcttggtacacaaaacgcgatgcctggtggcatagagattcccgtcacgaagctcatcgcaaacttctattttgccggatgcgatgatttcccggagtttacgtgcatgctgagcaaagccatccaaaccttcccactcgttattagtacgctggcggtaaacgggactgaaatgacgattgagtatcaggtccagtggcacctcctgttgattgagaatttcatccagcacggtagtaatagtcattattttcatgggtgatcctctgtgaaagtgatgaatactttacaatcgactgaatggcttaagtacggtataaaagacattaaataccgtaaacaagtcaaaatgaatgatccattaattacattcgagccggccttcgcttcagaggggcaaactttagtcgtcgcggtacgcgagtctgatgtaatacgggaaacgccaaatcaccatcacagctgtggacagctactcggttcgaggcatgggctactcacggtcgatgccggaaattgtcgctgggtggtaccggcgacacataccgtctggatacctccggatgttccgcacggcctgcgctcgcatggcccgtattcaggatggagtgtttatgtatctgcccaagcctgtagcggactacctgataaaccttgtgttctctcaataacaaatctgctgcgtgaagcgataacgcgagcggcctcatggaaagatgtaaaccttaacgcgtcccaaaaacgtttagctggtgtcatccttgatgaaattggctctcttcctgaggtcaacctggggctttcaatgccccaggatatccgactactcagaattgcgcagacactgtcagataacccggacgacggccgcaggctcgaggaatgggcagtctgggccggaatgtcatcacgtacgcttacacggcgattccgtgcagaaaccggttttagttttaatgaatggcgacagcgcattcggttactcaggtctcttgaacttctggctgggggtaagccagtgacggcaattgctctggaccttggatatgataacgtgagtgccttcattgccctgttccgacggatattcggcaccaccccgggacgttttaaaatttaaacctctaactctgcagccccacactagatatttaaacatggcagtgacattgcaaaatcacagcgacagagaatcaggaatatttctggctcttctcaaagagtggcaatcagtactgacgatacatattccacagtgtctgcatgcagcaggctctttttgagaatgaagctcagggtttactgcagaatagataaagtacagtgtaaaactcacgctggcgacagcaccgagacggcacatataaaacggaatcgccctatccctcggccagccaaactcagtgcccgactttgttatagcggacctgtactcaagatggttcaggatgaaatctgagcatgactgccacgattacgtcagtgagtagactgctttgtcctgcttttttatggcctgccagtacgtcagcgtagtgttcttaacgtaacatcacacctctgttccacctggccaattcagtcaacgactacgaggtggcaaataatgttgaccgcctgtgaggccgctgcgatacatatcccttatatacattgacaaaagcacatacttgttatatttacattatttatcataggttaaatttgaggattgttcgtgatgtgatgctccgtacataagcccataacattatttttaaatgcctaccagaaaggatgtattgcctggctgaaagctagcacgcatcaggtaagcaaagacttgtttagcttatacggacatcaagaatgattcgagcactcatgaatgccctggcaggaaagccatggctgatgttacttggtatatctttcattatttcctctgtcgggaatggcattacatatattgttgtttttagcgaactgattcggctcgctgccccgacaacctcccttgctttagcgtatgtgctttcaactgttcctggcttaatcggaagtaaggttggagagtattattgccgtactggcaaccctttctccattcttgtcgtgggcgaatttttaggcatggcaggcttgagcgccccttttatggctgtgttaaacggctcaattcctctttttcttatcgcacaaaccgtgtcagccttcatcatcggcatgacgttccctgctatgagtaagatatttaaaaccgggttaagtgaaaaggaattacccgttgcgaccacactggaaaccattatctttgcatgtaatgttatttttggtgttggactgggtttgttactattggggcatgttaccgtaatacacctgctgatcattgacctggccagttacgccctgtcagtcatcatgctattgagcgctaaaggcaagttcaggaatattttccattatatagaacaaaaagatgcagttataagatggaaagaaatcagtaacactcagaaacgaggtatcctgctattacccctattggcattcgcaggagccccggcgatggcgttactgccagggctggttccaacgaatcttaccggtcatgaagctcaagcaacagctttggctcttcttttctctcgtagtttagggcaactcatcggcccgttactgcttaatcctgagcgttttgagaaaaatagtaataataatagcctgctattgggatgtctgtttatttttgtggcatgctatggcctgatccctttttcaacctcatcttacctggcattggcactggtctttattgcacatattttttcaaatgttgttttctcgctcgcagtatattcagtattgaaaaaatttgatgaaaatcatgtggctgctgctatggctaagagctaccgatggcagatgatgatcactgcaatagtctctataggtgccgggtatagttcggattaccttggggtaatatacgcgctttatgccttcagtggctcaggctttttgctaattgtaatcttctcatttgtcgaaaaatatttttctccaaagacacggtcaaacaacctcgagctggaatagtagaaaggctacacagcctgagggctgtgtagccttataaattaaaataattcaatcgcctgaatcccctgattcacgctttcgtctccggaatatcgcctcgcaagataatgaagacatcctattgcacgaaagcgtgcaggagcatggggaccgctggttaacaacttacgcatgatattttcagaggcatattcacgccagagcattaacagactggtctggaaagcttcacgtaattcactagtttcttcctgagacagcctctgaagcgttttccaggcaatatcgcaaccagataaatcagccaagcattctcccctggtcagaagcccattaatgtagtttccgggaaggacttctatattgctgtaaaaatcagcgattacatttgctttttgaataaaattagcttcatcctgttgtgtccatagcatgtttaaatttccattttcgtcaaaatagcaaccttcgtcgtcgagagcatgacttatttcatgggcaataataattccgatagagccatagttatatttgatcccgaggttgctcataagcaatggtgactgtaagacagcagaggggagtatgatttcatttttacgtctgttgtagcaagcattaacttcatatccgtacatgtcccagaggtgagggttaaaaggtccattcaggcaatcactgtaatgcctgaacttttcctcttttattgctagtactgtttctagcggggtcgaaaatttaaggaatcgatggtatgcagtaagtaccggtggcgttccaattttaattttaatggcagaaatcttacgtagcgctctggacttgaatgtatctgacatccaggtagactcctgaatgccgtgcgtgaatgtgataattatctctttaaccatctcctctacaaattttaatgtttgaggcgtagagtagcgctgtgtgtataactctgaaagataatcatcgaacgatgtgatcaaatgctggtaactacaaatcaactcttcaggatatttcctttctgtcccaacaatattttgaacaaaatcatcaattacacagttatttatattagagaagaaaaacctgtattttagataaaaacgaaccttagcataagtttcaagagtttttatggaggtggacaataaaatattttttactgcatgggaatagcccagagactccagcacaatattttgtggcagggatgccttaagaccattacataaacaggccaaatctaatgctgttaaatcttcgaaaactgaatgtgacacagtgttgcatgtaaagcgtgggttacgttcctcctcagtggaaagtttattgttaacaagattttgctcaagaaggaatatctcgtgagcgggagtttctggatcagaaataccaatcgcagtaagtatttcatttagtatttcaaaataagctgctcgagtctccgtatagaatgaatcacaggaattataatattgctctcctggcataataagatcggcgcactcaaatcgcaaacaactgatgcgcgtatcttcttcccaggggacgacccttatccggaagagcgtttctgtaccgtaccgggtgcagcacccgagaagatatgacacatgttgtgtattgctataagctgactgaaatctgataaaatgctttgcgaagaatgcagatgcatccgtgcctcttatctcaggatcatgaaatttatcataagtttgtttaatgaaaaactcatcatcatttttgggagatttgataacttcatccagcatttccttaacctgcgagtacacaatatcacgtaattcagtaaacgtactactgtatgtgactgattttacatcccgcatctgtgataaccatatttcattatgattaagatataaatagttttcatctgaaagcatcttaaaacccaccttattgataataacatttcattaacaatgcacgatttcataaaaaaaacaatatatgaaataggataaaaacatgacaatgtgcacacaataagaaacacaccgcatctgtttgatttttaacaatattttatataaataaaaaagtactattaattctggtagatatgcttgacttaataaaaatggttagttaaatgttaaaggtgagtgttaattattggttaaatttaacgtttctcattaacgcaaaaaaactacatagggtcgcgctatgcttatcgttggtgtatcagcactgaaccatgattctgcctgctgtattattgagaacggcgaggtaatcgcagctgtagaggaagaacgattttcccgaaaaaagcacgaccctcgcttcccgtacgcttcacttgagttttgtttgcgtaaagccggaaaaacctatgctgatattgattgcatcagcttttatgaaaatgaaaaattaaaacgtgctcggcagttatggagtgcaattcatgcgccggaaatcatgtccagattgaacctggatggtgaaagtgttgttgataaaattcgcacactttttggcaatgataaacctgtcaaaagttattctcaccatatgagccacgccgcagctgcaaggtatctttcaggttttaatgattgtgcaatattgattaacgatggtgttggtgaatgggaaactacgaccatgtgggatgcctgtggcggtgtactaaatcaggttgcatctacacattttccacattctgtcggtttgttttacgccaccattacgggcttccttggctttaatgttaacaatgatgaatacaaagttatgggcctggcatcatatggcaaacctgctcttgtagaaaagcttcgggaaataattaaaattagtgagaccggacaaattgagctggatttggcttattttgatttctgtgctggcgtcaagatgtactctgagaagttatcagttctgctgggtttcacggaacgaccggctgacagccctctttctcaggtccattatgatctggcaagcagcgcgcaatacattctggaagaggttgtcgtaaagcaattacagcatttaaaaacgttgtctccctcaaaaaacctgtgtttagcaggtggcgtagctcttaactgcgtggccaatgcaacgataagacgtagtgggctctatgaaaatgttttcatccctcctgcggctggagactctggtggtgctattggtgctgcctttttggccgctcaggaactgtatgataaaaaaaatattgcattggtaacgaagggtatccagcactgcttttggggaccatgcgtggggaatcatgagattgtttccaccttaaaccagttaggtatagggtaccaaagtttatcccgtgaaaattgcaaccgcaaaatagcggccgatcttgccgatggttatgttgtaggaatttttcgtggggcttctgagtttggaccccgggccctcggtgcaagaagtatcattgcagatccccgcaatcctcatgcacaggatagggtaaatctcgttatcaagcagagagaaaaattcagaccttttgctccagtggtcctaaatgagtataaacatgattatttcgattgtgattttgaatccccttatatgacagaagtttgcccggttaaaaaaaatgcgaacttgcctgctgttacacatattgatggcaccgcacgtattcaaacagttaacattcatgacgggaatcacccctttgttgaacttcttaagtcattttatgatttaacaaattgccctgttttattgaatacttcattcaatttgcgcggggagccgattgtcaataccattgaacaggcgttaagtaccttcattcattctgaaatggatgccttagtattagaaaaccatctcatatatcgtgaaaatatcccgttaaatcttgccaacatcagaaagcctatattatcagaacgtgatgatgaagcacgaacaacagtttatacttttttttaaaggcataccacatgactattcagatgaataacaaaggaatttgtattgctctggcagaacaaatgatggctgccgggcctcagttaaagagactggaaagtattttcagcaatcgagtccttcaacaaaaggattctcttccctttgatttctgcgagggaaggttggtcgatcctttgaatcatatacctcagcagataggaatatggtccccggtctttgagggtaccaacctgaaatactataagcgtaataaagaactgtttaaccggttcggcggaaatgatgcatcatggtcggaaacagaaatgttatatcgggcaaatccaaataagaaaacgattatctacatgggagaatctgtagctcgtggttttgtatttgatcccgttgtaacacctgcaaaattattaaaagataaaattgcagaccatgattatgaaattgttgatttggcttgtaccggaatgaatgcttctgctttacttcaaaccgtacaggaagcacttgagcttcatccggatatgattgtcattcatgctggtaataactggtggaattcctggtggggaaatccgtcagcagaggtcacgacctcattaataggcttagatagccttcagattaaagatgttattactcaacaggttaagctttatatcacgtttattctgcaatcaatcgttaacctttgtaagaaaactgaagttaaattatatttcgttttacctgaatttaactacgctggctggcaaaatgaatttgctataccggcatggttagacgaccagacatcagcatgttggttggaacatgtacaaaacgctaataatttattcgccctacaaaaattccctgaaatgcaagccgaatgtaataaggctttggtactggataacgaaacaagtcccttatcattagagctaatggctaaagcagaagaaggtttaggtaataccgtcattgctaaagaatattatattaaagcaaaaaatgccgtggtctggcagtacacaactcatactccacgctgcccaagttttattgaagatttaattcgcgagataataggacaaaatcctgattgtgagctcattgacctaccggaaatattttatcaacgctccggtaaaattataccagataaaacactttttgttgattacgtacatcatagcctgaagggtatggactgggtaagcgatgcgctagcctctgccattaccaaaaaaaataccattatcaatctttctgaggtttatgataaagattgtgcaggtagctatttactggcagcactccataatgctaattatggtcaacaagaggatgttattgaatattggctgaataaaaccctggaaatgagaaaacttacatcatcaagctcaaatgagttatcttttattactaagcattactcagccgatcaaaaattacacaaagaaatgtacacatcagccaacgcatcaataaataaatttctgcgtgcttttcacattagcgaccattcagggataagattatatgagctcatcaaaaaatatcatcctgaacaacttgaaatcaatgaaaaaaaccttccctctgagaagagcgatgttattgtcataaacagtagaaatcaccatattttccggttttaccctgaacgctacgcagtttttactgcaatgacatatcaaaataagcttttgatgaatgaggtaaatccctattcatttttttgcgtaaaatctctgccttctggcgaatatgaggtcactatctgtatcagatcgacgtcatcagagcatagtcaaagtgcgactatctctattaatggaaaggatacaagcgctaatttaagctcagaatggcataatttcattttttcgacatcccttaatgaagggcaggatattaacatcagtattatgtggccaatcatctcaggttcctgtgattatcacagagaattacttgcaaaagatatgattgaaggtaataggcagttaccagtaatgcgaattaccggagttattggacaaattatcattagaagtatttgaaagtactctgtactttcatggggcaatatcaaacgatattgtgaataaactaagaaaggtaaatgtaaatgacaatggaaaatctgcaatgtggtccacgtatgtttgcgccgttctcagaggatgttcagaagctgatcagtgatatcgatacagcccaaccaattgaatgtggtccacgtatgttcgcgccgttttcagaggatgttcagaagctgatcggtgatatcgatacagcccaacccatggagtgtggaccacgtatgttcgcgccgttctcagaggatgtccagaagctgattagtgatattgatactgcccagccgatggaatgcggcccacgtatgttcgcaccgttctcagaggatgttcagaagttgattggcgatattgataatgctcagccgatagaatgcggcccacgtatgttcgcgccgttttctgaagatgttcagaagctgatcggtgatattgaagaagaccagccgatgcaatgtggcccgcgtatgttcgcgccattctctgaagatgttgtaaaacttattaatcagttcgaagctccgcaaactcgtcaataaatgtaaggatcagttgattctcaactgatccttttttaaggagtatataatgaaaagaatacgagtggttggtacaggtattaaaggaataaaacatattacccttgaagccgtcaataatttttccgagtgcaagaaaactttattgtttttccctcaaaatgaactgttaaaatattttgagaaaaatagacttccttacgatgacatcacgaacctgtatgttaatggtaatgaagatatgtcaaactatacttctcttttaaatcgtgtttttgatgaggtttcactaaatgatgatatcgttttttgtatacccgggcacccacgatttggtgtaactttaataaaactattgaatgcgcgtgcgaatcagtcgggtattaagttaacagttacacttggtttgtcttcttttgataccatgctaaatgatatcgaacttgatcctattgagcaaggcgcggcaacactcgatgcaaatttgctgatattactggattataacatggagccacgaattaattatttcctatatcatatttgttccgttgggaccacgcgtacctttattaaagaccctgcacaggataatgccattcattaccttaaagctaaacttctcaagcattatccagaagaccataccttaaaaatggtaagctcagctgagtttggccgagaacaggcaattatcagagaagttagactcgggatctcgaaagtttgttgccttacatcaccttctcttccacattatttgtaccttacatgaagccgcatgcaagccagattaatcgtgaatttctgaagaatcttcagggctccgccacttcttaggggaaagctatgtttttatatggcattactaataagggcgagcttgcacaatattattatcagcgttgtcctgactttaaatttaatgaactcccgccctatctttgcaagatcttaactgaggaaagattagcaccaataggtatattggataaatggtgtggttctcaaggtatcacttatccgattaatactttagagtgggaggagaataagatctttttttatgatcgtcaagcgtctgcccttttggctaattatgtatcagtcaatccagaacatgttactgaattgagctctgaaaaagtaaatctaatacagacaagcattaaatatatggcctacttttttccatcacagactcaaattatatttgaatttacgtccgttatcgtctggttaaaagcaaatgaatgtggttttagtggtgcggcatttcatgagctacctcattgcactttcttaagtgatgcattctttatagcggtaacaccatcagcaatacttgaacctatccatcggccatatattatatttgagaatctatatcatgaagccttacatcatcaattatcagcttcagtaatgcttcatacaaaaggttattatgagcctgaaaaccataacaatcgattttattacatcaaatccagaaataaaagttggtcaataccaaatatcctgcaggcagcatatgtatatctgaatgtattatcaaccagaatcagctatttgcaaataatcataaaacataatcttccatgtgaaactatatataccagtataacgcaggccattaactactgtcgtgaaatgattaacgttctacttcaagatgatatgttaaaacaggatattcaagactatatatcaaagatggacgcgcaccttaacttattgacgaaggaatataaaaagttatgatcactgctaaagagttaatttatataaatcaatcttacgacaatcatcaaaatattttgcatgagaacttacttgattcagtattatacaatgagaacctggtatttagaaacataagagataaaacattagagctcggttatgtttatgggtgccaacctaatgaattgtggctacagtaccgttcatttcctttaatggcacttaacgacatatttgaacaaaaatttatacctttttgtgataatgtttcatttttagagaaaacaataaacgccggtcttaattttggcgtggatctaccattcttaacaaccgggatgacaagaaatcctatatttcatgagtcctgtcactgtgttgctgattcagttttatttagtgatgcagataaaatttccgataatgaaaagtccattagatacttattcgctgaagcctatggcttctgtcttttccagttctgtggtttacaggctaaaagtaaggaaagcattatcggttgtataattaatgatatcgcaatactgacgcctgagttgaatacttttaaagatgcattacaacgattcggtcagcataataccatgatgatttatatgatttctcatatgttatgtatgtctcaggttgcaatgagtgatataaaagcttcatttttttcacaatatgtagacatctctttgactacggaaaatgagagttccattaataagcttattgcgatgggatattctattttaccgtctttttcctccaccgtgcagtcaattttttataccctcgtgaatttacccagacctacccctgaaatgacgttggaattattaatggataataaattcaataatacttttcaacagcaatcttattttttagcggatattgcattgcgaggccatcatgactgaacgttataagccagatatgtctgtaatacatcattcacatatgttgaatgataaggttcgtatcgataaatataaaaaagcaatttctgagacgattgcaccacatgacaacgttgttgatataggctcaggatgtggaattctgtctatgttaagtgcccagaaaaccactggacaggtctatggcatagaatattttgaattcgctatttcattatcaaaagaactgtgtaataaaaaggataatatagaatttattaaaaattcatctttccagacgtctcttagtgatcacatccatgcaatcgttactgaaaccattggtcaaatcggaccagaggaacatatggttgaagccatatgggatttttgtcgacgccatccttccattgaaaaaattataccatcgacactgagtattttcgctcaaccagtacatagcgcatggtttgatgaattcagacaggaaaaatttttttcgtacaatgctctagctgaatataatatgagcagcaaagattctgattatattattaatgactaccttggcagaattatatttcagaataatctttcttctgcacatattttcaatacagatacctcaacattacttacgtcctataaattagggatcacatcatcttcttcctttactaaggttataacactttctgagcatcatactcctgttgctaatgcactccatctttactttgaatccgaacttaatccgggtaacattttagacacacattattcttcacctcttacacactggcaacatagctttgtactaataccacctggaaagcatcgcgcgatgataagctaccgtgcaggcgatcgttttatttcatgtgaatgggaatagggaactctatgttttatccttttaataagagtgtttttgatagccttgagatcaaagaacaaccttttcggcatatttttgctcaaaatattttgcacgaagattttttaaaacgatttgaggaaattactggcgatattgaggcagagcattatggtaaacatgcgtcaggatatcagtttgctcattatcctgaccctgactttataaaatatgtttactcacaaccatttttacaatctgttggaaatctttttggacgtcctgtacgtcccagcaaacaatatttcttgccgcaggtatacatctttccggatcattaccgaggtttgcctcctcatacagatgcgtctgacaagcgtgatttagctatgattttctatatttcagaaggatggaatgaagagtgtggaggggaattacgcgtgctagagaaaaacaaatcgccacatagttcctttgcccctgtttttaactctatgagttgtatggaacttttcgagaattcttggcatgaagttttaccagtcaaatcaaactggataaggaaaaccctaatcattgattttgactattgttaaaaataggggttacccctatttttattgcccatcaactgctcaatttcgtctatttcttttggacagccgtttgtcagtattttatgtccattcctagtaatcaggacagtatcttctatacggataccaatattacagtaacgattatctgggcagttttttgatgtgaagtataatccaggctcgattgtgactaacataccttcctcaagaggacgattttgctgaattccggataagccaacatcgtgtaaatcaagtccaatataatggccgatatcatggggataccatatattcaaaatgtcatcctttctttcttgagaagaaatgagtccgagctcagcaagagaatataaaaaaaattgtcgaacctcttgctgtaagtcatataagcttactccaggctgtaactggcttatggcttttttttgcgcgtttaatacaattccgtaaattcttttttgctcttccgtgaaatacccactgactggaaaagtccttgatatgtcaccagcataattttgatattcgcatccaatatctattagtaataactccccatcccttaatttcttgtcgctatgcagatgatgtattatgctagaatttgatcctgacgcaatgatactttcgaatgcacaccctgatgcattcttatttctgaattcatactctataaatgccgctacctttctttcacttacaccactgtcaattatatcaataacctttttcgccgtcctggcagtaatatcagcggcctgtgacaggcaactttgttcttctaaagatttaaatacacgcagctcatgcacaatgcttctgtaatcttttatgatttctggcgctttccattcttcactccagtttccatagatgcgtagtttttcaataacacttaaaacacactcatcatttttaacatcccggctaaatgcatgatacagtgtattggcttgatttaatttgttaaaaagcttatcttccaactcttttaattcaaatatattatcaaaactactgaactctccttttgttaatattgattcgccgaaccattgcttttctttctcactagtttctttacaaaacaaataatggtgtatttctgatggttttttctcgatgatcagaattgcgtttggctcattaatccctgtgaggtaccagaaatcactgtcttgtctgaatggatactcttgatctccattccgtataaatttcgtagcgccaaacaccactgccacgctatttacatccattttatcacttaactgtactcttctttccagatagcgatccatattaacctttcctgtgatgactatgcttattgtattactgttcagattacatttatcattccataagttgaagttttttctctgcaaaaaaaacgatacttatcacatcttttatcctcattttaattccacaatatttatgttgaattgtaaagggacacagttcaccgactatgttgcaactcacttgatgtaacaactagtgtttcctttcaattcataattgatgagcgaacaacaggcattggcattatatggcaaccagaaagagagtaacccaagccatgtcggtccatctcataacttgttctctatgtttttataagcccctgaaaaccatcatatggcatccaagggcacatcaaatttggcaaccggtaactgattaattacccattagttggagttactgcagcaggaattgtacgtatccctgcaaaaagaaccatcaacttttagagagtctctggtactccaacttccgctgttggcactaagcggaccgcctgaagcattgcgaggtttgctgagagcgaacagcggtcggcccatccagcgtaggaacgtaaaaaaaccgcggtgaggcggtttagctgtctagttaggaagttgcgcttgcgagtcgtgcggcaaatccgatgaagaacatacccaccagcgcgtttccaatggttgataatctacggttgcctttcaaacggcttagcagataagagccgcagaaaacaaggaaaccgaaatagacaagagtaatcgcgaacattaccgcagcaagaatgataaacgccatccaggaatgttcagcctgaacattgatgaactgggcgaagaaagagatatagaacagcagtgtctttggattcagtagcgtaaccagcattccacgcccgatgatccccttagcatcagctgaagatttcttttcctcactcgtttcgacagttggcttaaagatagcgcgtatcgtctggacaccgagatagaaaagataggcagcacctgcgtatttgatggcgttaaataaggctggagttgagcttatgactgcggccagcccacaccatgccagcagaaccagaagtacgtcactcatcagaatggaaaatattgcagcaaagcctcgtttgacgccgctcgtaatgcttgttttgatcacgaacatggtctcagggccaggagcaagcactatcagtgtcgcaccaagcagatacgtccagaaattcacgataccaaaatcagcaaacatttttactccagctctctcgtttttatcgaggctattctaacgtaaccagcgttaatgaaaacacatcacggctgctttctactcagtcaatttccactcctggcatagagcggacgagcaaacatttattaagactgaatagcgaatttcggacgaattagcaggcgtacatttttattacggtatgtaacatgactctggtattgaaaaccaaatcgctcagctaaataatttgagcgttggttttcttccgcaataatacagcataccggggaggtaaatgtctggtctgcccaacctaaaatcgctgccaatgcttcattggcgtaaccctttccgcgcatttcagcgatgattgtccatcccgcttctggatattttaatgttggctcagtattgcgatgcgcatcctgaaacccaaacgcgccaatataaagatgtgttgctttttcaaaaacagcccagtatccataacctaaagcttgccagtgacctatgtaacgtaacaagcgggcccatactgcttctgccgtgggaacttctccgccatttatcttaaccatttctggatcagcccagcatgcctgaagagcggaaaaatcctctaacgtgaaatgttttagaattaagcgctcagtctctagctgaggtgcctgctgaaaaatcattatatccccttgaatagtcaggttacatagtctggtttattagtataaattgcagccagcctatagcattaacataaaatcaacaatgtcttcttcccacaataaatcatttgtacgcatcactaacggcaatcggtcaatataaatgatgctccagaactaaactgtccgctcctggtacaaagcgaaccaaccaactgaatttaaaatcctgtctgagcgagaagcggacactggatttaccggttctgtataacctaacggatagattttgatactatgccggacccgctaaacaacatgcggatacccaggccgatcatgacaatacctgtaaatcgttcctgccattgtataacgcctgggtgtttacctagccagtttccaaatgcgcctgataccatcgcgactgaccccagagacacgattcctgccagcttttggatactgccacgaacaagcaattgcagccagactggacccgctgcgggatcaacaaattgaggaagaaaagcaaacatgaacagcagggattttgggttagccaggctgttcagagctccttccttaacggcattccagtcagaaatttttgccgtttttcgcagccgcgtatcagtacctgaggtcgcaatcattttgatgcccagccacatcagataagccgcaccgacccaccgtaacagatccagcgcaaccggccaggcatgaacaacggttaccagcccgaggacaagaaaagaaacttgcacaaaacctgctacaaatacattgcccaggaccgtaagcagcgcaatacgtcttccctgaccgacacctctggcgatagtcagcatcatgtctggcacaggagaaatctccagcagcgtcagcgcgagaaggaaagttataaacgtttcgatggaaggcatcgtgattgagtccagaaaaatatttccgctacgttaccactaccgacccgaaggccggtagctgttgatacaacccattaccactcgttatttcaggttgttgcggaaaaagtccgtcagcttgtcgaaggggatcacgtccgtgcggtcatacagatcgacgtgcccagccccggaacgacatacagctctttaggttgaccggcgcgcttaaaagcgtcctcgctgaactcttttgaatgggcctggtcaccggtaataaagagcatcggacgcggcgaaatggtttcaatatcattgaacggatagaagttcataaacttaccgatactgctcagcatcggtttggtcgtcagctcctctttctcgccctgcggggtgtaaccgccgcgttcggagcgatagaaatcaaagaactcgcgctgaatttgcggcgtagaagcgtccagcttattcacggtacccggaatgtatgctttctctcctcctttgaactcggcaaaccgctgctcaatggccgactggataaaggccttgcgctgttccaacgtctgggaatggttaagaccgttacgaaacgcggcgcccatgtcatacatgctgacggtggcgatagctttcatacgcgggtcaattttcgcggcgctgatggcaaaacttccgctgccgcagatgcccagcacgccgattttttctggatcaataaacggttgcgtactgaggtaatccaccgccgcgctgaaatcatccgcgtagatttccggtgaaatcaggtgccccggcttgccttcgctttctccccaaaacgagagatcgatcgccaacgtaacaaatccctgctccgccagcttctgcgcatacaggtttgcgctttgttccttgaccgcgcccattggatgaccaacgacgatcgccgggtttttggcgttctgatttatcgttttcgggataaacagattgccgaccacgttcatttgatactgatttttaaaagtgactttctgctgcgtcactttttcgcttttataaaagttatcagcgcctctggacatatccgccgccgaggcggcaaatgcgctgatgaacattcccagggctaacgcaaatttattcatgatagtttccttgtcaggacgagtgtgatgaaagaccatcggcagacgcgtctgcacgtgaggccaggaaaatcagtacggttgcgataatcaacatcgcggcgctggccagaaaggtgctctggtagccatgatggtcgaacagcaggcccccacggtggatcccagcgcaatggacaattgcaccatcgccaccatcagcccgccgcccgcttcggcattttgggggaacgtgcgtggaacccatgcccaccatcccacgggcgcggcggttgaaataaacccccacagcccgagcaaggccgtcacgatggccgcctgtctgccaaacacgatcagagccagcgcgacgatcgccatcagcacgggaatcgccattagcgtcgggtagaatccgcgcttcaatacccggccaatcagcgtggtgccgatgaaacccgccatcccgatgaccagcaggatgagagtcaccgctgaggcgtctaccttcgtgaccgtctcaaggaaaggtcggatataggtaaagagcgtgaactgccccataaagaagatccccacacccaacatgcccagcatgaccacccgacggcgtaacagtgcgaagacgttgccggccccgcaggctggcgggtaaccggcatagagggcaggctgagcagttgccagataaacgcgacgatggcggcgggtaacaggcagaagaaagctccccgccagccgatgacggaacccagccagctgcccagaggcgcggccacaacggttgccagcgcgttgccgctgttaaaaatggccagggccaacggaacacggtgcaccggcaccagacgcatcgctgttgccgccgacatcgaccagaacccgccgaccacgatgccaatcagggcccggccggtcatataggtcaggtaattaggtgccatcgcaatgacgcccccgaaagtgccatgatgcacgtcaggccaagcagcagctttttccggttaagcgtgcctgccagtcgggaaataaacaggctggtcaccaccgcaaacgcgccggaaatagcgatcccctgcccggccatgccttcggtgaccttcagggactgcgccatcgatgtcagaaggctgaccggcataaactcggaggcaatcagggcgaagacgcacagcgtcatagcaaacacgccgccccagtgcgcctgttgtttttcactggctccgttctgatttctggtttcagttttctgattacgcatttagcctttcttttctgttgataatgcgatgcccttcccctcctgaaacggcgacgtgggggataagcgcgtgagttaaagagaacgatggatatggaaggcgcgacgactcaatccgcagccctgaacccggcagagaggagcatcagcagtgacgtcttacggtgagcattttccatctcgtttagcgttgacattttcatcgcattattgttaccaataggcagcggtgaaactagctaatgaatgcttaataactttataagtaaaatttataaatagcccggaaaccaacatggcaagacgcaacctcaacgatttactctctttcgtcaccgtggcgcgggaaggcagcttcacacgtgccgccgcacagcttggcgtgacccagcctgcgctgagccaggcgatttccggactggaagaacgaatgcaaatccgcctgctgacgcggaccacccgtagtgtgtccccgacggcggccggggaacgcctgttgcaatcggtggcccatcgtattgacgagatagaggctgagctggacatgctgactgaactgcgggacaagcctgcagggaccgtccgcatcacctgcgggccgaacgtgctgaaaacgaccctgctgcccaagctgacgccgctgctccgcgaatatccggatattcatattgagttcgatgctaatcacggattccgggacatcgtggcggatcggtttgatgcgggcgtgcggcttggcgatacgattgataaagatatgatagcgatgccaatcggcccgaaattgcgtatggcagcagccgcctcgccagattatttcgcgcgatacccggtgccgaaaacgcctcatgatctgacgcagcatcagtgtattaatatgcgcatggtccgctccggcgggatttatgtctgggaattcgatcgcgagggaggagagttgaaggtccgggttaatggacagttgacgtttaacacgtcggatcatgttgtcgacgccgccctggccgggttaggcatcgcctttttacctgaagaggaattcggctcacacatcagagaaggtcgtctcgtacgcgtgcttgagtcctggtgccatccttttccgggctactatctttattatcccagccgcaaacagccttccccagccttctcactcgttgttgatgcgctgcgcatgaacgggaaactttaggattaagatcttttcgcagtatcaggatggacttatcaaatgaccagaacagagaggcttctcgagttactacagatattaagagcgcaaagatatcccatcacggcatccacgctctctgaaagattagggataagcgtacgttcgctttatagggatataaaaacgctgcagcatcaaggggtgcgcattgaaggtggggccggattaggttatatcgttaagtctgactttcatttgccacctttaaatctttctcatgaagaaatcaatgctattacccttgggctaaattgggtatctcataacacagataatgatttcaaaaacacagcaaggaatgcgcttgctaaaatacacgccgtcattcctgccgaattaaaaaaccttattgaaagtcaatcttatttaatcggcccttcagaaaataatgaggtctttttcaaagacattcgcgatgctattaaaaagcaaaagagagtccaaataaaatattgtgacaagaaaggcactgactcttctcgtgttatatggcccatcggattggcatatatgcagtcatgttggcttttggtcgcatggtgtgagatgagaaatgattttcgtcattttagaactgacaaaattgcagagatggcacaactggactctatatacagggaaagccgggtggctttattgaaaaaatggagaataaaagaagggatcgacgaggagaaagagtactgacaaaaactgtcacagctattttgtatactcccccatatgcaagaatcaattctacgtcatagggggaaggatgaatttccagaataaagttgctgtcatcacaggaagcacgacagggataggtgaggcagtcgcagagcaattacaccaacatggtgctaaggtcgttattgtctcccgctcgccagagcaggccatccaaaaagcgaaacaattatcttcacaggggcaacaggcgctggggatcggatgcgatgtgtcacaccccgaacaagtagagaaaatgattgctgaagtgataaaacatttcggcagacttgattatgctgttaataatgcgggcataacaggtgagcatggtaaaaatatatcagagcagacggttgaaaactgggataaagttattgccacttcattgagcggcgttttttactgcctaaaatacgaaatacctgcaatgatgaagtttggcggctctatcgttaatttatctgcagtcaatggtctggttggcattccaggattagcgccctacaccgtggctaaacacggtatcatcggtttgacccaaaccgcagcattagagtttgcaacgcaaggcattcgaatcaatgccgtcgctccgggctacgtccaaacgccacgaatgagtgaattccctgacaatatcgtacgtagtttcgccaatagccacccaatgaagaggatggcaaaaatgcaagaaatagcagacttcatactgtttttgctgtcagaaaatgcggcgttctgcaccggcggcgtttatcccatcgatggtggttatttagctgaatgaactattcccgagtccttttaaactgcaagagtttcataaggctttaacgtcggctataacgaggtgtgaacctcatacagttcgacgttaaccctggggaaccgctcattcccgttcttcaatccagctcacaagctccgcaaactgagcttctgaaaaaaccgcgatgccgtgctcgcagagcagtgacgccgccactcccatacccgatttacgctgattactgaaagaaccattatagataaactgactgccgcacgttggactaccatcagttaacaatgcggcggtacaacctgcttcttgtgctgctcgcagagccagccaggctgccagttgataatgcggcgtaacatcccttcccgtattttcaattattctggcttgtccactcattacttctgtcccatcagccgacacgatctcggcaggtggtcgcggaacaggtagcccggcagccagctcagggcagtgaattaccaggcgctcctcctgttgccagcgagcaagttgatgggtcatctgcgctttctcttttccgttataacggactttaaggcccatcaggcaggcactgaccagtattttatttatcatttctttgttggcccccggcgaccgttcacccgcgctttccgcggcacacgaaaacttagccctgcccggcaggcagcagtgattccaccagcgccgtccacagcgccacgccgggcgccagcagatcgtcgttaaaatcgtagctggcattgtgtagcggcctggagggcgtctcgccatctgtgcctatccagaaataggcgccgggacacacttccagcatgcaggcaaaatcctccgacgccatggaaggattgatctgccagcgtaccgctgcttcgccgagctcggcctgcgccacctcgcgcaccttcagcgcctgctgctcatcatttttggtcaccggatagcccggataccacgaaatctgaccgtcaacgtcggagacctgcggctgcgtatgcacgtattgctcaatcaggttttttacgcgctcgcgcaccgtattgctcaggcagcgaaaagtcccgcgcagcaccacgcggtccggtagcacgttgatcgcctcgccgccgttgatctgggtaatgctgaccaccgcggaatcctgcggcgacaggcgtcgcgacggaatagtctgcagcgccataatcagctgggcggcggcaacaatagggtcggcgccgctctccggcatcgccgcatggcagcttttaccggtgagcgttatctcgaaggcgtcaagcgaggccatcattgccccgggattcaccgccacatgcccgagcggcaagcctggccagttgtgcagcgcgtaaatggcgtccatcgggaagcgctcaaacaacccctcttccaccattttgcgcgcgccgccgaggttctcctccgcgggttgaaagacaaaatgcacggtgccgccaaagttgcgggtctgggcaaggtgcgcggcggcagccaacagcatggcggtatggccgtcatgaccgcaggcatgcatcacgccaggacgacgcgaacgatattccaccgcccctgttcagcgataggtagcgcatccatatcggcacgcaggccaatcaccggccccgggccgttctcaagcgtcgcgacgaccccggtacctgccagcccgacatgtacctgcaggccgaacgaagccagtagcccggcaacccgacgcgaggtctcctgctcctggtacccgagctccggatgagcatgaaaatcgcgacgccagccgatagcttcggcaatcagtgaagacgataccgccatgtcctgttcctttcattactgaatgagtggtccccgtcctgctgcttccaggcggcacccttcgttatatcctttcgccccgcggctgacaacttcagcgatgatgatttttgtctattcaccagcggatcgttttatcgatatcaaaaatagtagctatttcagcggtgacttccgccagctgattaattatcatgcagactggtcggcgtcttgccggattatccacctgcaaccttccgttatcgggaatacaatgtttaacccagaccagaatcgcctggctcccacgctggcgatgatcatggccgcttcacttgtgggatttatcaccggctatacggtgccattaatcagcctcgagctggcgcagcagcaagttgctccgctttatgtcggcctgctggccgcgctgccgcccgctggaatgatgctctcttctttcctttctcccgctctgtgccgtcgttttgaaatgggcgcgttgctcagcgttagcctgatcctgctggcgttggcgaccatcgcctcctgcatgaccaccgacatgacgctgttgctggtgccgcgcctgctgaccggactcgcctccggcgtcattatcgtattgggggaaagctggataaccggcggcgcggcgggcagtaatcgcgctactctcaccggcatctatgcctcggcatttaccggctgccagctcgccggcccgctgcttatctccgtcggccccgcctggcaacacgcggcgctgatggcgattgtcgccattaccgccgtttgcctgctgatgctgcgtcatctgccgcgcggcagtcgcgaaagccttgccgagcgcgccagctggcgtagcctgggggcattcttgccagttctggcctctggagtattctgctttgccttcttcgacgccagtattctcgcgctactgccgctgtacggcatcgataaaggtttaaatgaaacgatggcggtactgctggtcaccgtcgtcctcaccggcgacgccatgttccaggcgccgctgggatgggttgccgaccgcttcggcatccgtcgcgtgcatcttatctgcgcggttgtctttagcctgtcgctactggcgctgccgtttatgctcgcctcgcgcgtacagctgatggctatctgcctgctgctcggtgccgcggcgggcgcgctttacaccctgtcgctggtgcgggcgggtaaaacctttagcgggcaaaagttaatcatgattaacgccctgtttggctttttctggtcagcgggtagcgtggccgggccgatagtcagcggcatgctgatcggcgtctccgggtatgacggcttgatcatcaccctgttcgccagcggcgtgctattcctgctgatccagtgtcttagcaagaacgaaaaaacgctgctcgccaatgagcaggaagaggacatggaagaggctaccgagaccgcgcaatagcggaggttgttgataacgggcaggcaggactccacctgcccgttttgcttatggctacagcaccttactgaggaaggcggcggtgcgcggattggtcggcgcgctaaagatctgcgccggtttaccctcttcctgaatcacccctgatcgatgaaaatcacccggtcggccacttcgcgggcaaagcccatttcgtgggtcacgataaccatcgtcatcccttcgctggcgagatttttcatcacttcgagcacatcccctaccagttccggatccagcgckgaggtgggctcatcaaacagcatgatcgacggcttcattgccagcgcgcgggcaatcgctacccgctgctgctgaccgccggagaggctggaaggccaggcatcgcgcttatcgctgaggcccaccttcgccagcaaggcatccgccaggtcgaccgcctgctggcgcggcatgttgcgcaaattcatcggcgccatcagcaggttttccagcaccgtcatatgcggaaacaggttaaagcgctggaacaccatgccaacactttcacgcatcttgttgaggtcggtcgtccggtcatgggcggcaaagccgttgaccaccacttcgccttcgctcacggtttccagcgcattcatgcagcgcagaaaagtgcttttgccggagccggagggcccgataatgcacaccacttcctgcggtttaatatcgcaactgatgccgcgcaacacgtggctatcgccaaagcgcttatgtaaattattaatgtgaatcacttttgccaaacctcttttccagacggttaaccagttgcgccagcaggaaggtaatcacccaataaaccagcgagatcgtcaggtagggttcccagtaggtggcgtaagcgccggagacggttcgcgccgcgtaggccagatcggcaagcccaatcgccgaggccagcgatgagtctttaacaatagcgatagcgttgttgccaagcggcggcagaatgcggcgaaatgcctgcggcaggatcactttacgcatggttttccaccacggcatacccagcgcgcgcgaagcttccatctgccctttatcgatagactggatcccggcgcggaaaatctccgacacgtaggccccggcgttaagggtaatcgccacgatacaggagaggaacgcgccgtagttagaacgcagttcacgggcgaaatcggcgctcattatcccgctggtgaccagcaggccgtcgcgcgggttaataaacaacggcaccagcgcaaagtgtactaccatgatctgcacgaacagcggcgtaccgcggaaggcgctgacgtagaagcgtaccggaaactgcaccagataacgcagaatatatttccatggcccgtgctcggccttcgccatccgccccagtccaagcgttaacccccacaacgtcccgaggatcacgcagataatggtacatttaatcgtcatcaaggcgccgtccataaacagcgggccgtactcctcgatgatctcccaacggaatcccgtcatagtccttccctaaaaaatacggccatcgcctgagcgacagccgcggtcactgaaaattcgtgttattgcgcaggcagcgtcggtacgttgtcatcgaaccaggttttatagattttggcgtaggtgccgtcggcaacaattttctgcaaaccggcgttgattttgcccagcagttcactgttacctttagcgacggcgataccgaaatactggcgctcaaatttagcatcaggtaccagcttgaactgcttttccgggtgctgcttgatgtagtattttactaccccgacgtcgcctaccgcggcgctgacgccatcctcaaacagctcctgcagcatcagcggcgtattgtcgaagcgcttaatggaggtgctgtttttacccagttcctgcgaaaccacaatatcgccggtgctggagttcaccacgccgactttctcgtttttcaacgccaccagcgagttcacttttgaaccttccggcaccacaatcgactgctcggccgggaagtacggcgcagagaaatccaccatctgtttgcgtttatcggtgatagtaatacccgagatgataatgtcgcgatcgccgttgcccagggtggcgaaaatgccctcccagggagtgttgaccagcttcacgtcaaaaccttcggccctggcgatggctttgatgatatcgatatcaaagccttccagctgtttttgactattttcaaattcaaagggacggtaggtgccgccggagccgacggtataggtttccgcagccgcctgtccggctgccgccagcgcggccatcatgaaacacgctttgagcaaattcttgaccatgagatatcctttttatgcatttattttgcataaaaatacacatacttagcatggcgtgcaaccggaaagcacctggatagcgaattatcttttgttcaaccgcgttgaccacctgatttgccgatggctcgatgcaattcattgattcgcttcattgatttgaccgtcttttgcggcgtagtcgaggcgacggacagcacgatcatctcaaggcaaatcagcaccgtaccgtgcagcggcattcgcccgttatcgccgccgcgcggaacatcaatcaccacctgcgccagctgactgaagcgcgaatccagcgcctgagtgagtaatatcgctgggatccccagccgctgcgcctcgcgcaatgtggtcatgccctcacggtgcggcgatttttgccccatcataatcagcacgtcgccgcgctgcaggctaatcaactgctctgcaagactgaagccggtgcgattgagggtacaggcaggtaagccaatacgattaaacagacgcgcggtgtactcggcgaggatccccgacgccccgatgccaaatatcgccacctgacgcgcatcgcccagtagcgccaccgcctgggctaccgccgcgcgattatccgcacgcgatagcacctcacaggcgcgttgatgcccatccagcacaaagtcgatgctggaattgacatcacaggagagtgccccaccgtcgagcgcatcttttccgacgaggtcgctgacggcccgaaccagcgcgccatggtctcttttaactcgcgtagcccggcaaaacctaaagcctggatcgccctcaccacggtggcatcggaggtgtgagtagcggtggcgatctccatcgccgtacgctccagtaccacttcacgattatcattgatgtagtttgccacctcgcgtaaacggggcgaaagctgatgcgcgcgagcgcgaaaacgctcgccaaaaagatcgactctcccttctcttttttcacccctgctttcatttcgcccccgccggaatcggccgcccggcgatgtgcgactgcacctgagcaaccatcagcgtcaatgcggcgtacgaattagaaataacctcttcgcgcggcagcaaaatatagcgtccagttcggcaggcgcgcataaaatcacaccagccgggcattaccgcctccatggcctttagctcatcctgcggcttaccgccggtgtccgaacgccaggtcgcgaaaacaaaatcggcatccagctcaggtagctgttcagcgctgacgtcgatccgctggccatcggggatcttgtcgatcaacggcgggaaacggaacccggcgtcacgcagaactcgccccagcgcgtgataggagtggtgtaccgtcaccttgccgttattcgcctgtatcaccgacacgcggtactgctgcgggtcgaccgtggcctttagctgtttaatttgctcctgataacgacgttcaagcaccgcgagccgcgcctggcttccggtgagctgcgccagtttgcggtaaatccgcggcgcgctgccctgcaggtgatcgatactgaccgtcggcgcgattttcgctagttgctccaccgagacatgccggctcggctcggtaatgatcagatccggcttcgccgcggccacggcttcaaggtcaatatcggcggtgccaataaagcggatctcgctattgtcgaaatcgacgccggtcagttgagcgctggaacgtaggtagtggctgccgtccgggcgcgtgcggccatggctggccaccggcggtaccccaagctcaattagcgggatggtgatatcgagatcgtgcatcgaaacgattcgctgcggatgcagcggtacgctcaccgtacgacctaaatcgtcggtgaaggtttgcgaatcgccagccgagacggcgcccgcgaacagcatcagcagagaaatgaaccaacgcataacaatcctttttgatttacagggcgtcacggcgacgccaaagcagagcaataaaaaatgggcaccccaccagcgcaataacaatccccgccgggatctgcagcggcgcaaacgccagccgccccagcgtatcggttgccagcaccagcaacgcgccaatcagtgcgctgccgcagagtaacgccacctgaccgccgcgcaggacgaagcgcgccatatgcggcgccatcagaccgacaaagcccagactgccaacgcaggaaacgctggcagaggtcagcagcacgggggcgaagaaacgcagtagcgtgagctgcgacaaacgtacaccaagaccgatggcggtacgatcgcccaacagcgccacatccgccgcgcgggcggtgcagaacagaatcaatgcgccaggcagcgcccagcaaaacgccaccgccagcagcggccaggtcgccgcgtgcaggctaccggagagccagatcatcgccgtctgtacatcgcgtacgtcagcggtggtcataaaaatgccaaccgccgccgccagcgtccatgacacgccgatgccgatcagaataaagcgcggacgtgaacaatcgcgcgccagcgctagcaccaacagcgccaccagcacgccgccgagcattcccgccagcggccgccacgccagccctacggccgggaaaaacagaattagcgccagtaccacaatgcaggctccctctttgacgccaataaggccggggtccgccagaccgttacgggtaatgctctgcatcgccgcccccgccaggccaagcatggcgccgcacagcagcgccatcaaaattcgcggcaggcgaatgtcaaacaggataaagcgttgctgctcgccaatctgctccggcgccagcagcgcacgcgcccatgtcgaagacggcagcgggaagctgccgcggctgaggctgtagaaccccagcgtcagcaaaatgaacaggatgaaggcggcaattttcaatgctgccggacgtaacaataggcgtgttgaacccatcgccagaggccgaaatccggcgcgatgaacggcgcgtttcatttaaaaaacctcgcggcgataaagataaacagcggcgcgcccaccagcgcggtcatcgcgccggtcgccagttcctgcggggcgacgatcgtacgggcggcgatatccgcgagcaccagcaccagcgcccctaccggcgccgccagcggtaacgccagacgaatatcttgcgttatcagacgacgtaccacgtgcggcaccaccagcccgacgaacccaattggcccggcgaccgccaccccgcgccgcacagcagcgcaatagcggtcagccccagcagccgggtctggaccagattcacccccagccccagcgccactttatcgcccagcgccagcacgttcagacgtggcgcgaggagcagcgccagtcccatgccagatagcgccggcactagcgccgcctgtaaggtagcccagttcaacccggacagatcgccggcaagccaggtgcgcatcgccagcagcgtttgttcgtcaagaattaatatcgccgccgtcaccgccgaggcaaacgccgagatcgccacgccgcatagcgtaatgcgcagcggcgtcgccccgccgcgcccggcagaggccagcgccatcaccccgccgaacagtagcgccgcgccacaggcggcggttagcgggcgtgccgccggaaaatcgccgagagagaggcccagcgccgaggtcgcgaccaccgccagcgaggcgccggcgttgagcccaagaatatgcggctcgccaagcgggttgcggatcaccgtctgcagcagcaccccggcaacgccaagcgccgcccggtcaacagcgccgccgccaaccgaaccagacgtaaatcaacaataatgcgctgatcgaagttccgcgggtcgtacgcgagcagcgcctgcaggaccgtctgcggcgcgatccaacgggcgcctaagccaagatgaatcagcgaaccgacgataagtagcagggttaacagcagcatcgccagtcgcggacgagtacgacgccgcgtggcatacagcacagcggcgctcatcgggcaacggcctgacttgcgcgaaacggcataaagaaaggtttgccggtttgcggattgattgacatctgcacatcaacttcaaagacgtttttaatcagttcggggctgcagatttcctgttctgaaatggtcccggctatccgcccctttttaagaaataccagcaggtcggcgtagttcaccgcaaagttcaggtcgtgaagcaccgtcactaccgtgcggccatgttcgcgggtcaggctttgcagaagttcaagaatttcgacctgatagcgcaggtcgagccaggtggtgggctcatccagtaatatggttttcgtctgctgcgccagcgccatcgctatccagcagcgctgacgctggccgccggaaaggctatcgaccgccagatgggcgaattcggcggtgccggttaatagcagcgcctcttccaccgcctgttcatcggcttcagaccactggcgcatcagcccctgccacgggtagcgcccgcgcgataccagttcgaacaccgtgagcccttccggcatcagcggcgattgcggcaggatccccagctggcgggaaaccgttttggtcggcatgtcatggatagcctttccgtccagacggacgcagccaccgagcggttttagcatccgggcgatggtcgataacagcgttgatttgcctgacccgttagccccggcaagcaccgtcattttaccgctggggatcgtcaggttaatgtcatcgacgataagcgtctggccatacccggccgacagggattcaaggacgatccccttctctgcagggttcacccgctgtggcataactcgctcctgcaccgcagcgttcaggcatccgccttcaacgttctgcagtcaaatcaaaataaatctcattctcttttgatcatgaaggggatgaatgtagtagtcaatactgtgcttcatgttgcttccttcacgttcatcatcgcgtgaagagacaaaatgaattttatgaatagtatttataatcaataaaataagagcactttaccgcctactacaggttgctaaatcgcgcttttcttctgcgatgattttttatcttacataacatttactactacatttcttcgtgcttgaatgattctcaattacatatctgaaggcgcgttcagatgcttaacagataggtttaattttcagggcaatgattttattggctttatctgaccgcaaaggcagattcgttcacgagaaacagataatgactcaaccccatgtcgcctgcaggacattgcaagggcgcgcgcttttttcgcttctttttttagcctcaccgggattaatggccgcagaaaataacgcggcaaagaatacaaaggacattgaggacaccattaccgtggtggctgacggccgccagcagaacgccaccagcggctatcagccactgagttcgtctacggcgacattgacctcaatgccgctgctggatattccgcaggtggtgaataccgtcagcgaccaggtgctggaagatcagcacgccacttcgctggatgaagctttgtataacgtcgccaacgtagtacagaccaataccctcggcggtacccaggatgcctttacccgccgcggcttcggcgccaatcgcgacggttctatcatgaccaacggcctgcgcaccgttctgccacgcagctttaacgccgctaccgagcgggtggaagtcctgaagggcccggcctcgacgctgtacggcattcttgaccccggcgggctgattaacgttgtcaccaaacgccccgagcgccagttctctggttcggtttccgccacctccagcagttttggcggcggcacgggtagcttcgacgtgaccggtccgatagaagggactcgtctggcctatcgtctgatcggcgaatatcaaaatgaagattactggcgtaatttcggcaagaacaaaagcagctttatcgccccttccctgagctggtttggcgatagcgcgactattaccgcttcgtattcacatcgcgattacagcgcccctttgaccgcggcaccattttcgatctcaatactggccacgcggtcaacgtcgaccgaaaaacccgtttcgatgaagcctttaatatcaccgatggttattccgatattgcccaactgaatgccgagtatcgtcttaacagcgcctggaccgcgcgctttgattacagctacagccaggatcactacaacgataaccaggccagggtcatggcctatgattctgcgaccggcaacctgacccgccgggtcgacggcacgcacggctcgacgcaaaagatgcattccacccgcgccgatctacaaggcaatgtggtcatcggcggcttttataatgaactgctgaccggcgtcgcctatgagaattacgatctgctgcgtaccgatatgctgcgttgtaagaacgtgaaaggctttaatatttatcatccggtttacggcactctcgatacctgtaataccgtctccgatgccgatagcgatcagcgcatcaagcaggagagctatgcgacctatctgcaggacgccctgtatctgaccgacaactggattgccgtggccggcgtacgctaccagtattacacccagtacgccggtaaaggccgtccgtttaacgtcaataccgatagccgcgatgagaaatggacgccgaaggctggcctggtctacaaggtaacgccaaacgtgtcgctgtttgctaacgtcgcccagtcgtttatgccgcagtcgtcgattgccagctatatcggcgaactgccgccggaagagtccacctcttacgaagtcggcgcgaaattcgaccttttagaaggtattaccgccaatatcgcgttatttgatattcataaacgtaacgtgctgtataccgaaagtatcggcgacgagacggtggcgaagaccgcgggtaaggttcgctcgcgcggcgttgaggtggatctggcgggctcgatcaccgataacctcagcgtcatcgccagctacggctataccgacgccaaagtgctggaagatcccgattatgccggtaaaccgctaccgaacgtgccaaaacataccggttcgctattcctgacctatgacattcataacgtctataacagcaacaccctgaccgttggcggcggcggccacgcggtcagcaaacgttccggcaccaacggcgcggattattatctgcaaggctatgcggtggccgacgtcttcgcggcctacaaaatgaagctgcagtatccggtaacgctacaggtgaatgtgaagaacctgttcgataagacctattacacctcgtcaatcggcaccaataatctcggcaaccagattggcgacccgcgtgaagtgcagtttacggtgaaaatggatttttaagccttgccctccccggatagcggcgcgctgcgccttatccgggctacttctccccaccccctgctgtggggaaataccggataacgcatttggcttaccaatcctcttcctggccgaggatacgcaaaatatcctgacgatgctgcaataacagcggattgtcgcgatggcggggaaacgccagaggaagcgtaaattcagcgataatgcgccctggccgcggcgacatcaccagcactctctcgcatagcagcagcgcttcttcgatatcatgagtcaccagcaggctggtataaccctgctgctgccacagcgcaatcagctcgcgctgcatgctgatgcgagtgagcgaatccagcttacccagcggctcatcaagcagcagtaaacgcggttcattcagcaacgcgcgcgccagtgccgcacgctgcgccatcccgcccgaaagctgccgcggccacgcctcgctaaacgcctgcagcccgatgcgcgaaatcagcgcgtcggccttcggctccagcccctttttcccctgcgcctgcggccccagcagcacgttctgccgcaccgtcagccacggataaagcgtcgggtcctggaaaaccaggatccgttccggccccggcccgtccatcgccgcatcatcaatctcaatatgcccgctttgctgtggctccagccccgccagcaggcgcagcagcgtcgatttaccgcatcctgagggccaagcagggcgacactttctcctgggcgcagctgcaagctgatattttccagcaccggcaccgtctgtttgcccaacgtaaaagcatgatgaagatgacgtaccgccaccgcagcgccggtcgaaattgtctgggcacttaccattgcatccctccgcgctgccagctcagcagccgatcgcgaatcataaatagcccgctaatcaggccggaacataacaacgccattacaaatagcgccgcgtacatattcggataggccgcccatccctgcgcccattgcagataaaaaccgatcccggatttgacgccgaccatttcggcgacaatcagcaccgaaaacgacgcgccaagccccataaacaatccgacaaacacgttcggcagcgcggcggggatcgccacgcgcaggatcagaaatcgctggctggctcccagcgttcgcgccacgtcataccacgctttatcgataccgatgacccctgaccaggtcaataccgtgaccgggaaccaggtgctgagcgcgatcaaaaaaacgctggcgccgaagctggaaggaaagataaacaggcatagcggcagcagcgcggtggaaggcaccggccccagcaggcgtaaaatcggatgcacccaataaccaatacgctgagaccagccaatcgccagcccgctgataaagccgcagctggtgccaagcaacactccgagcccgagtagccccagcgaatgcagcaggctatcaagcagccgcggccagtcatcgtgcaacacttcaaccagggcctgcggcggagcgaaaaacggcaccggcaaaaacgccgtcttggccgtcagcccttcccatagcgcgaagagcactggcagcagcgccagccattttccggcacgctgcaaacgcgcgccccgctgccgccagtaacggtaactcagtgccagcagcaacagcccaccgccaagagtgaactgcgccagcgcccactcctcgctaaacggccagcgccgaccggcatcgggccaggcctgcgtgaacaggccgcccagcagccatagcgcggcggcaagcccgccctccgtccagatcagagcgccgagtcccggtcgggcgagcgcgcggtcaggcgaaaacgttgacataaatactctccgcaaactgatgaggatcggttcccggtttgatgacctgtacccgctgaagatccacggcatactgcgtcagctctttaacaaaagcctctcccacagcatgatggccgtgcccctggccgtgaagaatgccgctaacctccgcttcgttagtatttagcgcatgggcgagaaaagattgcgccacgctttccggatgcgcggcggcatagctgtgcgcttccagaatcgcctgggtaagcgcggccgccgccggtttatgatcgcgcgcaagggcaccgctgacgcccaacacgcagcagctgagattggcgtaatcgccggtcatattgctggcgattagctgatatttcccggtttccagcaggcgatagctaaagggctcgctgccgctaatggcggcgatttcgcgtttatccaacgccacgctgagcaggtcggccggatagactttccactgcacatcgcttatcgggtcgatgccgtggcgtttcagcaagatggcgaagaagtttttatccggcccggccatatcggtgacgccaatggtttgccctttcagactctccagcgcgccaaaaggcgagtttttggccgtcagcagattcaggcaaccgccgtgcgttccggcggtaagtttgacgtcaaagccctgctccagcgccttcagccagcgtagcgccatgcctaccccggcgtcggccttgccggtggcaatcgcttccagcagaacatccgtcgagttaccaaagttaacaaactcaacgtcgaggttatatttactaaaaatcttctgctgctcagcgacggcgaccggcgccaggcacaccgcgcttttgttaatcgccagcttgattttgtaaggctgcgccagacgcaggggcggatgttcatcgccgctcgccatcttcgccatatcgtgagcccatagcggcacggacgccccggccaacgccaggccaccggtaaactgtaagaaacgacgacgggtaaaacgtgtggtcatcatggcgccgcctccgcatgaaccggcgcgaccggcacgttaaagccgtgatcaaatgtcggcgttacatcgagctttgcgcgaatgaggccgttggcaagataaaagtccgccgtcgactgctgctgggcgaccgtgggcgcgtccagccgctgccactgcgactggcggttggcaaactgcgcgcgggcgatatccgccgggaaacgaatgatctcccccaacgttttgccatagctatcgagattggcgtaagcccaacgctcggcgccggccagccgggtaagataatcctgaagcgccgcgcgcttttgcggatccctcagcgcattatcggtggcggccaggaaggtattacccggcagcagccctttgccgctcaccagaatctgcccttctgcggttttcaccagttgcgtggtatagggctcccaggtcgcccaggcatctaccgaaccgttaagcagcgcgacttttgcatccaccgggccaaggaatacccactgcacttccttcggcgaaacacccgcctgctccagcgctttcagcgccacaaaatggccaatcgatcctttcccggtggcaatgcgtttaccttttaaatccgccgcgctttttaacgcgctgccgggaggtaccaatacagcggtccccgccgggttgctcttatcgacggcaatcgcttttaccggcgcgccgttcgccagcgcgaacaacagcggcgcatcgccgataatccccacgtcaaccgcgccagcgttgagcgcttcagccagcggcgcggcagcaggaaactcggcccatttaatatcgtaagcgaggttttgcagcgcgttagcggcctccagttgtgaccgcatgccgcctttttgatcggcaattcttagtgtgattctttcctgagctgcaacataactgctcagcgtcaatagcattagcgccccggctatgcgggtaaaatggggtatgcgcatctgaattatccttgttgttgaaaagcgtgtttacccgccgccagccacgcgctgtcgttctgcggcgtatgtacccgcccgcacaggacgttgcgatagtggcgttccagaggatgttgccggcttaaaccatgattgccggtgagttcaagcgccaggttgaccgcctgaatggcgttatcggtgacagtgactttcgccagattggcctcgatggcggaaaagcccagcttcgcggcattctccagcagcgtgcggttaaccagcagcagcccttcgatctgccccactttttcctgtacccgcgacaggctggaaagcgcttgcccaagattgccggggacccgcgcaccaagccacgcgacaagccagtcgcgcgccgcgcgggctacactgtcgtaaatcgccgccagcaacgccgtatgacggttagcaaacagacgaaattgttcggcgtccggcgcgggcggctcgtcggtgggccaaacgtctaccgcgtgcccggcggacacctgcacgtttttcagcaccacctcgtgactgccggtggcccgcatgccgaggtgatcccagcttttcactacgctgataccctcgctgtcggcaggaaccagccagctaccgaccagcggcgggttgtcgtcgctgcgcgcccacagcgctagccagctcaatccttcgataccggtggtataaattttgtggccgttaatcagccagccccggctgttacggctggctatcgtttgcggcaggccgccgcgcgccggagagcccagatccggttcgacgcgcaggctattgatcaacccgccgtttgtgagcgcatcatcaaatacgcgctggcgtagcggctctgcccagtgcgtattttccgccagccgcagatgatgcagatactgcatgcagacaatcagcgcggttgccggttcgccccaggcgatggcggcgatagcctgttgcagctcggctaaactggcaccaggtccgccgtactgctgcggtacggcaaggcttaaaaatccgcgtcggcgcagaacgtcaatattgcgatggggaaaatcgccgctggcatcaaggctggccgcctcctccgccatcagttggcggatctcggcaagctgccgtggccaatctgcgattgggcgatgactcacgatgcacgctccgccacggcgcgcagcgcggctttttcgcgggtaatcggcagcagcgctttgccatactcctgcgcatcgttcagcggatcgaatccgcggatcaggaagttacgcacgccgaggtcgtagtagtcgatcagcgcatcggcaacctgctctggcgtaccgaccagcgcggtggagttgtggccgccgcccaccagctgcgcgatgccggtccacaggcgtttatccaccaccttgccctgcgccgccgtagcccgcagacgctgcgcgccaacgctatcgggcttggctttaaagcccccttcactctgcgccgcccgctcggtggcgacatgcaaaatatgctcggccttctcccaggcttccgcttcgctatcggcgataatcggccggaacgatacgctgaaaccgatctcgcgctgatgttttgccgcttcggcacgtacccgctggatagtttccgcagtctgcgccagcgactcccccatagcgcgaagacgttagcgtgtttaccagcaaccgtaattgccgcttccgacgaaccaccgaaatagaggggaatatgcggtttctgcagcgggcgaatcgccgaccaggcctgttgcgcctgataaaaatcattgtcgatgtccaccggctgttcggcggtccagactttgcggatggtatcgaggaaggcgtcggtgcgcgcatagcgctgatcgtggtcaagataatcgccgtcacggcgctgctcggcatcattgccgccgctgataatatgtaccgccagccggccgccaagcagatgttcaagggtggcaaatttacgcgcggcgagagttggcgagacaaaaccggggcggtgcgccagcaggaaagctatcttttgcgtagacaaccccgccagcgcagtcaccaaaaaaccgtcgggttgatcggaccaatgtcccaccagcagacggtcaaaccccgcggcttcatgtgtttgcgcgaagcgcacaatataatcacggtcaaaaatcggccctaccgggcgatggtttctgacgacaggcggtggccaatcatgccgagaaactgaatgctcatacagaactcctggtagcaaggtaatgaatgggccgcggcggcggcgcgttttcattaccctatacacaggcacttaatgagcgaaatgcatttttatcataacttaatatgcagaataagcatttaaaaaattgtagttatctttcagtcagatgcgttaagttgctgcacaatttttccggcaaaaaaagtcagcggctggctcagattagccagattctgcgcgtttaccagccacagatgcacttgcggccgaaaatccgcgagcgcaagcgtggccacttcatcgcgccacgggctggcggccagcgcggcgcgaggcaccagtccaagccccagtccctgcgccaccaggctgatttgcagctgggcgccagcggtctcgacgttcagcgcaagccgcagcccctgcgattgcagttcgcggattagcccggcccgcaggccgcagccgtcgggattcagtacccagcctcgctgcgcacagtcgcgcagcgccccggcgtgcagtcgccagcttttcgccgcgatgaccacgatatccagcggacacagcagccttccgctgtagccgtcagcaaagcgctgctgttgtggtcccatcgccaacatgccatccagttcgacgctctccagccttttttgcagcagcccgctccagccgcaggtcacctgcggctcaagggccggaaactgctggcgtagcgcgctcagcgccggctggagggcgatttccgccacgctctgcggcacgccgagtcgcagaacgccctgcggttccgcctccgggtcaagcagaccgtacagctttttggtttcccgcttaatgctcaggcactgctcatacacccgatgcccggcggcggtgagcgtcagggccgggtctggcgctccagcagcgtcacattgagggtttgctccagacgctgaagccgacgggtaatggccgattgggtaatgccgagatattccgcagcctggttaagagaggaaaactgcacggtagccagcagggcatcaatgtcatcgatacgcatataatccttaatgtgatttttgcatattaatatatgcggaaattgcattttaattatattaacgcctttgctagcgtaatgaccagtcccgacaacaggaaaccaccatgactgcaccgcgagtggaaaaattacgccagttcattcaagaccttgatgctctgcatcgccagtttaccgatgaggccaccctgctcgacgccgtcgccgagcgcctggcttcgctggtgcaaaaagacgactggttgccggaagagtacaccctgccgcatccccaccactatcagcagtatttgctgcatgctgattccggccaacgtttttcgattgtcagcttcgtctggggccggggcaatcgacgccgattcatgaccatcgggtatggggagccatcggtatgttgcgcggcgcggaggagaaccagcgctaccgactcgacgaacgcggtttgccgatcgccactggccctgctgaacggctttcaccaggcaaggtggaaaaagtctcatcccgcgatggcgatattcatcgggtgagtaacgcgctcgctgaccacgtctcaatcagtattcacgtctacggcgctaacatcggcagcgtccggcgtgctgtttataccgcggatgggatcgccaaacctttcgtctccggttactccaaccgtcacttgcccaatatctgggatctctcaaaggataatgaatatgcctgactacaattatcgccagccagccgaggtacgccaggcgctaatcgatggcgcagaagtggcgctcatcgatgttcgcgaagaggccgtatttgccactaaccatccgctgtttgccgctaatttgccgctcagcaagctggagctggagatttttcgccgcgtgccgcgcctgacgacgccgattaccctctacgataacggcgaaggtctcgctgagcaggcccttgaacggctgcaacgctggggctatcaggatgtcgcgctactggcaggcggactgacgggctggcagcgcagtggcggcgagctctttcaggacgttaactcaccgagcaaagcgttcggcgagctggtagagagcgagcgccagacgccctcgttgagcgccgaggaagtgaaggcgctgatcgagggtccccagccggtcgtggtggtcgacgcgcggcgtttcgatgagtatcaaacgatgaatattcccggcagcatcagcgtgcccggcggggagctggcgttacgcatcgaaggcctgctgccgtcggcgcaaacgacagtgatcgttaactgcgccggccgtacccgcagcattgtcggtacccaatcgctgcgcaatgccggcttagccaatccggtatacgcactgcgcaacggtaccatcggctggaccttagccggactggaactcgagcacggccaacagcgtcgctacgacgccgatttccgcgcctcagcgcagcgcgtggctgcggtgacgcagttggccgagcgcgctggcgtggccttcattgatgccgcgactttagcccgctggcaacagcagccgagccgcaccacctatctgtttgatgttcgcagccccgaggagtatgccgcaggtcatctgccgcacagcgtgaatgcccccggcggccagctggtgcaggaaaccgatcattatgccagcgtacgcggagcgcggattgtgctggtctccgacgatgagatacgcgcgccgatagcagcgtcctggttggcgcagatgggctgggaagtggcggttttacgcgatgtacgcgtggagcaattgagcgaacgcggcgttccgcctgccagcgtaccgccggcgccgcaggctgacgagataaccccagcgcagttagcggaacaattgcgtgaacccggcaccgtggtactggatttcaccaccagcgctaactatgtcgcacggcatatccccggcgcctggtggctggcgcgttcacagctgcgtcaggcgcttgagctcatccctcccgcaaaacgttacgttgtcacctgcggcagcagcctgctggcccgctatgccgtgcctgaagtcgcggcattgaccggtaagccggtacaactattaagcggcgggacgctggcgtggattgatgccgggctggcgctggaacagggcgagacacatctggcaacgccgcgcggcgatcgctatcgacggccttatgaaggaaccgataactccgctgaggcaatgcaggcttatctcgactgggagtatggcctggtggaacagttagcgcgcgatggtacccacggctttaaagtgttgtaagtcacaaacccggtggcgacacggtcaccgggaatagctcacctatattatgaattaaatttccggggtggttttaaagccaaccagcatcaggatcggctgcttctgcgccgctgcggcgtcaaactgatagtggttaccctgacggtcgccgccgatgtaccaggagatctcggttttcccttccgccagcgccttacgcaccgctttatcgatatccaccatccgatactcacgagatgaattgagatacagttgagcatcagagttgtagctgcaggtcgggcgatgcttccaggtcacgctcgccgcgctccagtcattactggccgggtagaagaagatctgatccgcgccgttagtttccactttgccgccgtacagacgcaggcgatatttaaacagcgacgcatcctgatctttcggcagcgccgggattttaaacttcaccagggtcagggtttccgggttgctggtacggccgccgttcttccagttatcggaaatctgcagcgctccaggcgccccgaagttaacattcggctgcgcgctctcgaccaccgcgttttcttccgccagcgagaagctataaggcacgttggtcccgcaatccatgccttcattcatacagtgttcggtcatgaagtgcgcgccctcgaccgtccagccgttcatgaaatcagcatgggcggtatagatgcttccccacttctcttcacgtttattgcccttcataaccgggtccatcgacagctcaattttcgccgtgtccagtgatttaatctgcggcagcacgtaggcgatattcatattaaccgtcgggatttttaccggatagtcggccgggcaggcgccgttgacatcataggcggcgttgctgtgaccgtggctcggcttcaggttgacgccatcccagcagttggggaactgaataccgatattaaactgcaccgcgtcgcccgctttacgtaggccgcaaacctcacctgccttgttgctatagcctttaccgttggcgcacaggaaggttatccgtgagctcggcgcggagccgtggtggtcgccagccagcagctctaaccccgacgggaaaggatgcagcggatactgttcgactttggtcgcctgataataggttttctgataagccggagtgacaatttgtccatccggcaacttcattgacggcgcccaataggcggaactatcggccttgttatcacaggtggtttccggctgcgcgcgcagggtttgataagttgagaccgcgtcggtgtgggtattgccgaagaaatcatgccacatcgcctgatttggcataccgaacatcataatcgcgtcgtcgccaagagtgtggctgtaaccgcataccgcctgggcttgcggtcctgcatgggcggaaaaagcgctggcggccagcagcggggtcagggccagtacaactgagttagctttcattttacgatcctccttgtttgaaggaccgtagagatagcaagcgtgcgccaatgttacacatcagcaaacatcattttatctcattcgcgcataatccatgaatactggaaggttttcgccgccggaaaatgggtgcgccgacggtacgagccgagcgcctgcggcgtgcagtaggtacagcttcccagccattcggtattttccgccgccactccggcctgttgcagcacccgctgcgccagcgcgcggagatcgaaccacagattatcgttcccggtcgcctgcgcttgcccggtttctggcggggcgaggcgctgatgaaacagctcgtcattgtaccgttttgccagcttgcccgccggcatggtcaacagcaactgataaaactcggccgaaacctcatagcagcaggcgtgaatatgcggcccgcagaccaccacaacgtcttctattgccacatgatgctggcgaaatagcgccaggctgttttcgataatgccgctggccgctcctcgccagccggcatgcacgctgcaaacatagcgcccatcccgcgaggccattaacagcggtaaacagtcggcggtgacgacgccgaccttttgcccacgcagagccgtaaataccgcatcggcatgcggccgctctgcctgcggcccctgataatgatgaacaacattgccgtgcaccagcttaaccggcgccatttcgctgtacggaaaagcggcggtttcgtgcacatcgagaaaagcgtaacgaataccggggatatcacttaataagcgggatggataagacataacggcgcatgaatggattggtggtggatttaccgtaggtcaaagccgctcgatacgcaagatgtggatgctttgttcccggtatcgctatataatttaatatatatcgcttattcttatccaaccgggttaatccatgtcaccacaccgtttacttttggcgctaacgttgttcagcgccagcctgttcaccagccaggcctttgccgaccgcaccgtcaccgaccaactaggccgccaggttacgctgccggaccacatcacccgcgcggtcgtcctgcagcaccagacgctaaatctcctggtccagttgaatgccggcgacgatatcgtcggcgtgttaagcagctggaaaaaacagctcgggccgcagtttgtccgctttatgcccgctattgaaaatctgccgacgccgggcgatttaactcaggtcaatatcgaaagcctgctggcgctgcatccgcaggtggtgttcgtcgccaattacgcgccgcaggcgatgatccagcagatccaaaacgccgggattccggtcgtcgcgatatccctgcgtcaggacgcggcgggcgagaaaaacaaaatgaacccgacgatggccgatgaagagcaggcctataacgacgggcttaaacaggggatccgcctgattggcgaagtcgtcgaacgccaaagccaggccgaagcgctgattgattacaccttcgcggcacgggcagaagctaacgccccggtcgccggtatccctgacagccagcgggtgcgcgtgtatatggccaatccagatctcaacacttacggctccggcaaatataccgggctgatgatgaaacatgccggggcgctgaacgttgcggccgcgacggttaagggtgcccgtcaggtctcgctggaacaggttctgcagtggaaccctgaggtgatcttcgtccaggaccgctatccgcaggtggtcaaacagattgaaaacgacccgcaatggcaagcgatagacgcggtgaaaaaccatcgcgtatggctgatgccggaatacgccaaggcctggggctacccaatgccggaagcgctggcgataggcgaactgtggatggcgaaaaagctctatccttcccgctatcggaacgtcgatgtcgatgcgaaagcgcaggattactatcaacgcttttaccgcgtgaaatggacgccgaatgcgcagtaaccttcactgggccctgctgcacggcgggctggcggcggcgacgttgtttatcgctatcgcttcgctatgcctggggcagtaccacctcagcctgaatgaggtctttcatgagcttacgcatggcgcgcccgatagcggcatcgccgggcagatagtctggtcagtcaggcttcccagggtaacgatggcgctgctggccggcggctcgctggggctatgcggcgcgactttacaaggcgtattccacaacccgctggtcgacccacatatcatcggtgtgacctccggctccgccttcggcggcacgctggcgatcctgctgggttttgacatcatatcgatgatggggtgtaccttcttcttcggcctcaccgcgctggtgttggtttatctaattgccaggctgcaagggcgtgaaaacacgctggcgctgatcctttccggcattattctcagcggtttctttgccgcgctggtcagcctgatgcagtaccttgccgacacggaagaaaccctgccgaatatcgttttctggctgctcggcagctttgccaccgccaactggcataaagtgctgtccatggcgcttccagtcgccgtcgccgccgttatcctgctaaagctgcgctggcgtatcaacctgctggcgctggatgataaagatgcgcgcggtcttggcgtttcggtggtcaaattgcgccgcggagtgttggtctgctgcgcggtgctggtcgccgcccaggtcgcggtcagcggcagcatcgcctgggtcgggctggtgattccgcacctggcgcgactgctggttggcgccgatcaccgtcgtctgctgccaacggcattctggctcggcggcgcgtttatggttgtggtggacgacctggcgcgcaccttaacccaggcggagattccgattggcattattaccgccctgctcggcgcgccgctgtttacccttttactcattcggtcccaacgccgcggagtggcccaatgaacatttcattatcactggacgccctgcgctatggtcatcgccagccgctcttcgccccgctgtcaatgcagtgccgtcacgggcaaatctgggcaatactgggtgccaacggtcgcggcaaaagtacgctactggataccctgaccggcgtcctgccgacgctcggcgggaaatttagcgtggaaggcagcatcgccatcgtgccacagtcgtttcgtccggcattcggctggcaggtacgcgatgtagtactgatggggcgcgcccgccatgtcgatctgttcgcgctgccggggccggaagatgaacgggaggttcaacaggcgctggcgcagttgggaatcgccgcgctggccaatcagcgttttcgcgctctgtccggcggtcagcagcagttggcgctcattgcccgcgcgctggtcagcgccagtcagaatatcctgttagacgaaccctgctcagcgctggatctggccaatcaacagattgtgttacagctgattagcgaccttgctcaccggcagaagcgcaccgtgatgttcaccacccatgatccgactcatgccctgcagatagccagccataccctgctgctattgcccggcggcgaatggctggcgggagagtcgttcgcggtactcagcgaagcgaacctacggcgcgcctacggcctgccggttcacaaaatcgactatcccggtagcgcggtgccgttgctggcgccgcagtttacgatccatcgttaacggccaaaaaacctgccgcacgcagaaagttctgcccttcttcagcggtgataaagcgccgcagctgccgcgcggcggcgctttcctcaatctccgccagttgatattcgcagcgaatattccacggctcgggaatgagtaacgtgcgaaactgcgcgctctccgtcatctgaaccgcatagtgggcgtagccgataaacagatcggctaagtcttcaccaatcagccacgtccctgcggtagtgcccgacggcacagtcagcgacgcccgaccgccgaccaactgctgcgcccgggccatcaacgtccgtccgaggcccggatagctggcctcaaggcgggcaaaaagctgccaggtgtaatcaccggaaggatcgcagcccggcgtcgaggtcgccagccgcagccgacaatcgtgcagtaacgccagccagtcagcgcgatcggtatcaggcgtgcggcgcacggtcagcatcagtcggttggcggcaaacgaacagcagtttatcgcaagcccggcctgtagcagcgcctgagggtgttcagtattcgcacaggcgaacagcgagcagcgttcgccgccttcaatgcgttcgcgcagcagaccggccgggccgaactgcgcctcgacctgaatgccgctgagctgctgaaatcgcgccagcagcgggaggaaagcgcttttcaggcttcccgccgccagcagcgtcaatgacgtggtcatcacaataatcgctataaagatgaaaatatagcgctagggtaacgccttttttgctgattcagtagcgaatttccgcccgttcgcgcagctgatccggcgtcgccaccgggagccggaagaactcgagataggccgggatcatttcgaacagcatatcggtaccgcgctgaatcggacaccccagcgcctgcgccgcccgcagtagcggagtatattcaacgctcatcaccacctcgccgacccaggtgcgcggcgacaggcgcgaaacgtccagcggtagcaggtcatccgctttcatgcccagcggggtggcgttgaccaccagatcctgcgcggcgggatcgcgctgcatcagaacgatctccagacgcggatagtgctgatgcagccgctccgccagcgcctcggcggcagataaagaggtatcgaacagcgtcaaggtactgacccctgcggccgccagcgacgcggcaatcgccgagccgacgccgccgcagccgaacacctgagccctcgccccttgtggttggaagcccttgcgcttaatccccagcacaaagccttcgccatcgaacatatcgccgcgtaggctaccgtcggcttcacggcggatggcattacaggcgccggcgattgccgccgtcgggctcagctggtcgaccagtccgcaggtagccattttatgcggcatggtgaccagcgcacctacgatgttggtcatggaaaacagcgctggcaccagcgccgcgtaatcctccggcttcaccccattggcaccactttgacgtccgcctcgcaatgggccagccatgggttataaatcatcggcgctttaaaactggcggtcggataaccaagatgcgctatcagccgcgtatgaccactaatgatcatgccttactcctgtcgttactgcgaaagttcgatgcgtttgacatcgccaagaataaacagataggccactacgccaagcagcgccgcgccgccgatatagaccagcgcgtagaaaaaactcccggaagcggcaacgataaaaccgataatcagcggcgtgaggatccctgccagattggtgcagaaattaaagatgccggcggttatcccgccaagcccctgcggcgcgatatcggagattagcgtccagccaaggccaaccataccctgaccgaaaaaggcaaaagacatcatcaggatcaccgccaggtcgctcggcagccagttggcggaaatgatgctgctggccatcatcagcccgacgacgataggtagcttacgcgccagattggccgaaccggtggcttttaacagcttgtcggagagccaaccgccaaacagcacgcctcccgccgcggcgagaaacggcaggatggcgaagaagcctactttcaaccacgccatgtggcgctcggtcgccaggtacgttggaaaccaggtcagaaagaagaccagcacggtgttaccggcgaattgaccaacgctggcgccaatcacctgtcgttttgccaacagctggcgcaccagcggccagctaaagacgctttgttgctgctgcacgctagccagtccgccgccgcgaagaatatgttcgcgttcactgtcgctcaggcggctgtcctgatggggttcgcggtagcaatgccaccagaccagcgcgaacaggatgccaacagccccgacgctgataaacagcgcgcgccagccgaagctgcccataatccagaacagcagcggcgagaaacaggccagcccgagatattcgccgacggtatagaccgccgtggccttcgcgcgctcctgctgtggaaaccaggtactcactaccctgctgttgaccggaaaacagggcgcttcactgacgccaagcccgaagcgacacagcaacagcgttttcaagccaatcgccataccgtgaaataaagtgaacagcgaccacagcgccagagagaggaaataggtcaccttattgccgaaacgatcgaggaaaataccgccgggaatttgtgccagcgcataagtccaggcgaaggcggaaaaaacgatccccatgatggcggcatcaataccgagctcggcggtcagtttcggcgcggcgataccaagcaccgtgcggtcgagatagttaatcatcgtgccgacggccagcagcgccaggatcccgatgcgccgccgggagcgaggcgcggtggtcgcggtatccgccgccgtcgcctggttatggctataagagttcatagtcgtttcctgtcttgagtacagatgaatgttgttattgtgtttgcgatgttgtgttgtgaaccatttgctacgtttagctgtactgcatcgccgaaaggcggacggcggcattcaccgcgccgtattgggcgtaaccgtcgcgccgttcggtcaattcgaagaagaaacgccccgtcgcgaatggacgggtataaaggtggaagaattcgccgccgcgggtatcacggtcgtagagaatttgcagacgttgcagcgtctctacctgcggctctccgccaaagcgcgccagcagatcctcatagtaattcgccgggatcggcagcgcgctcagcgcggcctgcggcagattttcgagcgttgcgggtaaatcgcgacaggcaaaagcggcgtgctgtagcccggcgccctgataacaggcgaccgaacgcgctatctgcgtggctcggctttgcgagatattcagcgccagacggatatcgccctgcgggctatgaaccgccaggctgcgcaccaggccgtatgggtcgggcaacgtctgttcatgttcgagactgaagccaaaaaccgtacggaaaaagataatccagttgtcgcggctatcggcctccatacctaacgccagatggtcaataccgcggtagtcgtcgcgcggcgctgctgcctgcaaatgaaaatcgcgggcgtagatgtcgtcaccggtttcaaccaggtaaatcaggctgccatccggggcgcaaaccgccgggattgaactctcattaggaccggcatctccctgccaggtggcataaccgtaggcgcgggcgcgctccacaaccggcgcgctgtggctcacccgcagcgccattgcgcacaacgagatgccgtggcgctgatgaaaatggtcggcccaactgtgcggctgcgcgttaacaatcacccgcgcgtcgccattacgccaaagcgcaacttgcttggtacgatgcttgccctggagcttaaaacccaactgcgtcaggcgctggccaagcgcgacagactccgccggactggcggcaaattcaataaactccagaccgtcatagtgcggtagcgcaggtggggaaaataacgccgcgtcgctatccgcaagctgccgacgggtctgctcttcgagccacagcaacgaacggtagccatctttcgccgtggcaccggtgggcgaggcgcgaaagccgtcattgaaaatctccagcgaccagggtcctcgatagccgcagcgggtcagttcacaggcgaaatccaccagcggcagttgtccctgcccggggaagcagcggaaatgacggctccattcgaggacatccatcttcatcaacggcgcgtcggccagctgcaggaaggtgattttctcaaccggcacctcggcaaggccttgtagatcatcaccgagcgacagaatatggaaactatcaaggacgatacccatcgccgggctgttaacccgctgcaccctttcccatgcctgacgccagcggttgacatgggttccccacgccagcgcttcatagccaatgacaatcccctcctgctcggcaagatcggccagcgcgcgcaggtcggcgacctgcaattcgatatcggggaacagtccggctggacgttgctacagagcagcatagtgttgcagcctaattcatgcatcagcgcgaatttccgcttcgcccgctgcaggttagcggcaaactgcacgcggctggcgccctcgaaatcgcgaaagggttgaaaaagggtgatttttagccctaattcagcggcaaggttgcgaatatcgcgcggcgtgcccgtataatagagcagatcgttttcaaagatttcaacgccctgataaccggccgcggcgatagcgtgcagcttttcgggtaaagtaccggatatcgaaacggtagcgatggaacgcaacataagagtcctcgggtcatcattcgacatgagcactgactatgtatcatttggttcacaggcgccagatttggttgctaaattgtgatcattatgtgtattttttgtctccataagaaaaaggagtcgttatgtccctcgttgctcatgatgaagcacaatccctgaaagagcgtatcttcgccgccgctattaccgtgtttgccgaatatggcctccccggcgcgcgtatggagcagatcgccatcgaggcgcaaaccaccaaacgcatggtggtctactacttcaagagcaaagagcagctgtaccaggcggtgctgcaacatgtgtatgcgcggatccgtgaaacggagcaacagctggggctggagcacctgccgccggtcgaggcgttggtgcaattggtgaaatggagcgtacgctatcacgccactcacgccgactatatgcgggttatctgcatggaaaacatgcagcgcggcaagtggttgaagggttccggggagctgaaaccgctgaaccgtaccgcgctgtcgattatcgaagatattctgcaacgcggccagcaacaggggattttccagcccggtctgcaggcgcgcgacgttcataggttgattagcagcttcagcttctatcaggtatcgaatttttatacttttagcagcctgtatctcgacgatccgctgcctgaaatcgacgacgaagcaatggtttcacaccactgcgagattgcggtaaaagcggtgattcggttcgttatctcttaagcattacttatgtcggggcgcggtgcttagtgccccgacaatgcgtgaataaccctttccattgcctcgcgggtgagcgctgaacgttcaattttgctatttgccagcgcggtgcgtacgacaccggcaataacaatatgtttcggctcctggccaagatcgcgcatttccaataccaccttacccactacgcggcacatttcctgatagagctcgtcgtctttcgctttatttcccattattaagactcgtaaattatcattatcaatcaattcattattgatacgattttataataaagcaaactgcgctattttttccgctcaatgaagcgttttattacctttaataggtctgtaaatatcataaaacgccgtttaatctgatccgttgcggaaaaagtgtgttgcagcttagcgagcaaatcgtgtgaattttgttacattaatcacactaaaaatgaaacaccgtttttattttcctttttcgtttcggcagcgtataatgcgcctcgattctttcttgaatggtttcagcgcattggactgcacaaaaaaacgtacaaaacattgccacttttcatgggctgaaccgccagcacacattcttctgcacgctcttttgttgtcacctatccttagagcgtggcattgcaactttcgtaacacaggtttgactccgcggcagtgcgcccccggagcgagatttccatatccttcacaacttaaagactaagactgtcatgaaaaagaccaaaattgtttgcaccatcggtccgaaaaccgaatccgaagagatgttgaccaaaatgctggacgcaggcatgaacgtcatgcgtctgaacttctctcacggcgactatgcggaacacggtcagcgcatccagaacctgcgcaatgtgatgaacaaaaccggtaagaaagccgcaatcctgctggataccaaagggccggaaatccgcaccatcaagctggaaggcggcaacgacgtctccctgaaagcgggccagacctttacctttaccactgacaaatccgtggtcggcaacaatgaaatcgttgcggtgacctacgaaggcttcaccaccgacctgagcgtcggcaacaccgtactggtcgacgatggtctgatcggtatggaagtgaccgcgatcgaaggtaacaaagttatctgtaaagtgctgaacaacggcgacctcggcgagaacaaaggcgttaacctgccgggcgtttctatcgccctgccggcgctggctgaaaaagacaagcaggacctgatcttcggttgtgagcaaggcgttgatttcgtagccgcttcctttatccgtaaacgttctgacgtggttgaaatccgcgagcacctgaaggcgcacggcggcgaaaacatccagatcatctccaaaatcgaaaaccaggaaggcctgaacaacttcgacgaaatcctcgaagcgtctgacggcatcatggttgctcgtggtgatatgggtgttgaaatcccggttgaagaagttatcttcgcgcagaagatgatcatcgaaaaatgtatccgcgcgcgcaaagtcgttatcaccgcgacccagatgctggattccatgatcaaaaacccgcgtccgacccgcgctgaagcaggcgacgtcgctaacgccatcctcgacggcaccgatgccgttatgctgtccggcgaatccgcgaaaggtaaatacccgctggaagccgttaccattatggcgaccatctgcgagcgtaccgaccgcgtgatgaccagccgtctggattacaacaacgacaaccgtaaactgcgcatcaccgaagcggtttgccgcggcgctgttgaaaccgctgagaaactggaagcaccgctgatcgtcgtcgccactcagggcggtaaatctgcacgcgcagtgcgtaaatacttcccggacgccactatccttgcgttgaccaccaacgaaaccaccgctcgtcagttagttctcagcaaaggcgtggtaccgcagttggtgaaagagatcgcttctactgatgatttctaccacctgggtaaagagctggcgctgcagagcggcctggcgcgtaaaggcgacgtggttgtgatggtttctggcgcgctggttccaagcggcactaccaacacggcttccgtgcacgtgctgtaataatttacaggttattttatttttttttaaagcgctccagttggggcgctttttttattcattccctagctgttcttaataaaaatgcaaatcggattttactatttaataagagattatctaagatgaatccgatggaagccttctgttttcacagcgctttttaaaccaaatcgacgaattcgatgcttctttgagcgaacgatcaaaaataagtgcattcgggtaaaaaaaatattctcatcccaaaaaagtttgtgtaatacttgtaacgctacatggagattaactcaatctagagggtattaataatgaatcgtactaaactggtactgggcgcggtaatcctgggttctactctgctggctggttgctccagcaatgctaaaatcgatcagctgtcttctgacgttcagactctgaacgctaaagttgaccagctgagcaacgacgtgaacgcaatgcgttctgacgttcaggctgctaaagacgacgcagctcgcgctaaccagcgtctggacaaccaggctcactcttaccgtaagtaagagttctggtaataaaaatggcgcacattgtgcgccattttttttgcctgtcgtttaacccctactgcgtcagtttgctatcgttctgctggctgttctgcgccgacagctccgtcgtcgcgctgcccgccccttcagaaaccaccacgggatagcccgctctccgcgacagcgcttttttcagcagcaggtcatccaccgctttatcgtcagaaaaggcgtgaaacgcggcaggaagcgagtaagagattgtccgggtattttccccttcggtttgcgaaagcggcctgtggacctctacatagcgtttaccatcaggttctaccgcaaacttcaccggctgattgataatccgtaccggcgtgccggcgcgcacctggctgaacaacgccttgatgtcgtcagcgttcattcgcatacagccggaactcacccgtagcccgacgctatcaggcgcattagtgccgtggatcagatattcgccgttaccataggccagccgcagggcgtagcggcctaatggattattgggcccagcggggatcaccggcggcagcttaatgcccttctccagcgagcgcgcacgaataccggcagtcggtgtccaggtcgggttagggattttctgcccgacgcgggtagtcatctccggcgtttccagccctaactggccaatgccgagcggatagacctgcacctgattttgtcccggcgggaaatagtacagccgcagctcggccaggttgacgacaatgccttcacgcggaacatccggcagcagcatctgcgatgggattaagacccgtgtacccggcttcggctgcaccggcgcaatcgtatcgttggcttcaagaatcagcatcgccgccgtgtcgaagtggcgggcgatagcctgcaggttgcgatccccttcctgtaccgtccagtattggttttggccaatcaaacggctgttggcaggggaagcggataatcgacagcccaggcgccgtgctgcgcgctcagagctgcgagaagggtcatcgtgatgagagacgcgcgtttcatactgagattccttctttcgctgataaaacgccaggatctgcgcggcgacgaaagcgttcgccttcgtcgcacgtaacagaatgaaatctacctgtttattctagctaagatttgcagctttcgcgcgaattgcgcggatcatcgcttcaaggccctgcgaacgggaggggtaagatgctgggttaacgccattttttcaaaccacgggcgtacatcgaattcgctaatatcctgcgcggtcatgcggtcataaaggatgaataccaccgcaatcagccctttgacgatggccgcatcgctatcgccgcgcagggtaatcacgccggatggctcctgctccatcacaatccacacctggctttggcagccctgaatgatgttctgcgcgatgtgttcttccgcgctgagcggcggcaggcgctggccgagttcaatgatgtagagatatttctcttcccagttagcgcagcgagaaaagttgcgcagcaatttgtctttgtctggtaatgccgccatattcgcgtcctttaacccagtaatttgtggatccgctgcagcccggcaaccagccgatccacctcttccatcgtattgtacatcgccagcgacgcacggcacatcgccggaacctgataatacgccatcagcggcatcgcgcagtggtggccagtgcgcacggcgataccgtagttatcgagaaaactgccgacatcgtaggcatgatgtttcccgagattaaaagcgataacccccaaccgatgttgtgggccgtacagcgtcaaatccggcacctttttcagctcctgcaaggcatagtgcatcagcgtctgttcatattcgccaatctgctcaagcccaatctggctgacgtagtccagcgctgcgccgaggccgataattccaccggtattcggcgtaccggcttcaaagcgccacggcgccttcgtccaggtggtgccctccttcaggctgacggtggcaatcatcgacccgccgccttcccacggcggcatctcctgcagcaacgcttctttggcgtacagcacgccgataccggtcggcccgtacagcttatgcgccgagaagacgtaaaaatcgcaatccagcgcctgcacatccaccgggtgatgcatcaccgcctgcgcgccatccaccagcactttcgcgccatgctgatgcgccagcgggatcagcgccgatagcggattttcagtccccagtacgttcgatacctgggttatcgccagcagtcgggtgcggtcgtcaaacaggccagggataacatcgagttgtagggtaccgtcctggttgagcgggatcactcgtagctcggcgccgacgcgggcgcagagcatctgccacggcacgatattggcgtgatgttccatttcgctgacgataatattatcgccggccccgacgttagccccccccagctattggctaccagattgatgccttcggtggtaccccgtacaaaaaccagctcttccggcgaacgggcattaaggaaaacggccgcctgctggcgtacctgctccatctgcgccgttgcttcggcgctcagcgtgtggataccacgatgaacggcagcgtaaccatggcgataaaactctgcttcggcgttaatcaccgcttccggtttctgcgcgctggcggcgctatcgagatagaccagcggctgaccgttaacctcgcggctcagcaccgggaaatcggcgcgcaggcgttccactgaaaatgtcatgcttcccctcccggcaggcgcttaccaatgcgcgccaacacctgttgtttcagcgcatcatcgttaatggcttcagtaagctcggcggcgaaagcgtacaggatcatctgctgcgccgcctgttgatcgataccacgcgagcgcagatagaacagctgttcgtcatcaatacgtccgacggtggcgccgtggctgcatttgacgtcgtcggcgtaaatttccagctgcggtttggtatcgacttccgccagccttcccaacaacagattgttattggtcatctgaccatcggttttcagcgcgtgtttcgcgacgttaatcaggccattaaataccgcccgccccttatcgctgacgatggttttgtgtagttgacggctgttgcagtagccaacgcggtgatcgagccaggtacggctgtcgcagacctcgtttttcaccggcatcgccagcgagttaatgcgcagattgctgttttcaccagccagacgggtgctggtatgatgtcgtaacaccgcgccgcccagtaggaagctgctgctgaaggccgaagcatcgcggccaagcagcagatcgttatgggcgaagtggtagctttgcccattttcaaacgccagcttaatatgcagcagatgggcgttgtcggcgacagacatggtcaggcgtccgccggtgaaatggcggcgatcgtcaagactaatatagtgctcgatgatggtcgcctgtgccccgctctccaacaccagatgatggcgatagtgggcggtattaagctcgtcgcctgccagtccgctggtaatatgcatcagcagcagcggtttctccgggcgctggttgcgtttcacgccgatacgggtcaccgtctgcgccaggctttcggtgagatggagaaacacttccggctgtaccgcgtccggcagatgctggcgctggttatcaacgctaacgtcaaaaccgctagcggtgagatcgtcgctaagcgccgggctgaagcggccgtcgataaacaccatccgccaggcgtcgaggttgagcgccagcgcgtcgcgctgcgccacgctgagtgtggccgggctcgcaacaaacgtgccgcttagcagcgcgtccagcggtgtgtatttccagttttcatgtttgcgcgtcggcaaccccacacgcaacagctgttgcagatgctgattggcctgcggcgtgcgctcttcaccctgtgcttcaaacagatgatgccactgctgcagcgcattactgctgttcggtaagccagccatagccctgctcctccagttgtttaaccagagtgaaatcgcccgacttgacgattcgcccctgatacagcacgtggacataatccggtttaatgtaatcaaggatacgctgatagtgggtgacgataataaaggcgcgtttgccgtcacgcagtgagttaaccccctctgagacaatcttcagggcatcaatatccagcccggaatccgattcatcgaggatacacagctcgggctcaagcaccgccatttgcagaatatcgttgcgttttttctcgccgccggagaaaccgacgttcaccgaacgagttaacagatcttccggcatcttcagcagtttgatcttctcttccattaaatcctggaaatcgaaacgatccagcgcctccaggccgcgataggcgcgtacggcgttgagcgcggtttgcaggaaaaactgattactgacgcctgggatttccaccggatactggaaggccataaaaatgccctccccggcgcgatcctccggggcgagttcgagcagatctttgccattaaactggacgctgccgccggtgacttcgtaatcttcccgtccggcgagggtagccgagagcgtacttttccctgagccattagggcccataatcgcgtggacttcgccggggcgcacctcaaggttcagcccgcgaaggatctctttgtcttctacggcgacttgcaaatctttaatacttaacatcttttttccttaattatcagccgacgctatgttcaaggctaatagccagcaatttttgcgcttcgacggcgaactccagcggtaattctgagaacacgtctttacagaatccattgacgatcattgagatcgcatcatcttcgctaataccccgctgcaggcagtaaaacagctgatcttcgccaatccgtgaggtggtggcttcgtgttccaactgagcgctgttattgcggcattcgacgtacgggaaggtatgtgccccgcagtccgggccgattagcatcgaatcacattgtgtgaaattccgggcgttcgtcgcggtcggcataattttgaccagcccgcgatagctattctggctgtgtccggcggagatgcctttcgagatgatggtcgagcgggtgttcttgccgatatggatcattttggtcccggtatccgcctgctgatggccgctggtcaacgccaccgagaagaattcgccgatcgagttatcgccgcgcagaatgcagctcgggtatttccatgtaatagccgaaccggtttccgactgggtccacgacatcttgctgttttcgccttcgcacagcgcacgcttggtgacgaagttaaggatgccgccggtattgttgtcgccggggaaccagttctgcacggtggagtacttcacttccgcatctttatgaatgatgacttcaaccaccgccgcatgcagctggtagctgtcgcgtaccggcgccgagcagccttcgatatagctcacgtagctaccctcgtcggcgaccagaatcgtacgttcaaactggccggttttctcggcgttgatgcggaaataggtcgacagctccatcggacagcgcacgcctttcggcacgtagataaaggtgccatcggaagcgaccgcggcgttcagcgcagcgaagaagttgtcgttgccaggcaccacggtgccaagatactttttcaccagttccggatgatcgtgaatcgcttcgccaaaggaacaaaagatgatcccctgctccgccagcttctcgcgataggtggttgccaccgataccgagtcgaaaatggcgtccaccgccacttctttgccttcgcgtaccggtaccccgagcaggttaaaggcttcctcgacttcatttgtcaggaaggtgttcgccccggtctgttgcaccgcgccgggttccgaggcgcaggtatcgtcgcagttgccgcaggatggcgccgagtagtagctgtaatcctgataattgagcttatcgtaatgcgctttcagccagtgcggctcctccatctcctgccaggccttaaaggcgttgagacgaaattcgagcatccactccggttcattacgacgagcggaaatcgcgcgtacaacctcttcattaatgcctttggccagctcatcggtttgtagctgggtaaaaaagccttctttatagttgagcgggccgccggtccagcttttgacatcgtcagttgcttcagtatttcgagacatagttactccgcctgaaccccgaagctttcgccgcagccgcattcgtgctgcgctttcgggttatgaaacttgaatatttcatttaagccttcgcgaacataatccagttcggtaccgtcaatgaacggcatcgcctgcagcggcgcaaacagcttggcaccatcgcgttcaaacagcagatcgtcgtccgccggctcggcaatcatttccagcacgtagccaaaaccggcgcagccgctggttttgatccccaggcgcagtccctgcttgtccggctgtttgcgcatcagatcgcgaatatgggccgccgcagcgggggtcatcgttagcccttgccagttgaaatcgtcaggattaaaggtgtttgtttgtagttccatcgctctacctcatcgagtgccgccatcgggccataccctcatgttagtgataatgattatcacttcaaccctgccggagcaggggtattcggccatttcgcccgtttctgcgcttttctataagcatagaccctggtgaagggcttatcaggaagcaattcttatatttaatagattgataaataataagttattgagaataagagcacaggcgaagcggcaatggaaaagatgtatcgaaaataccgatttatgcgatagagaccggaaatggcacttttcgtcaggtttggggatatgaaggagggttaatctaccgcaaaaaatcacaggataagcaggtcgttcataaaggaactctaatgacgaaggtcaccaaatttagttctctcgcggttttggctgtcgtgttgtgcgggatatataaaaccgcgtcgattaccatggcggctagcgccgattactcacgcgcggactggctcaccttctatctgattgcaccgagcgaagttaaacatgcccccctcatcaatgacagcacgccgattcacttcagggctgctgatggcgcctcccccagatagacgagattgaatacgccagggatacggacgaaaacatcttgtctgaatacctacgcgctttaggttatcgccaggaaaaagatccggtattcggcacccgctggtctttgcaaggcaccgataaaagcgcctatatcgctgcgactgaaaattcaatcaggctgacgtttacggattgaaatacctgagacaacggatagcagctggcgttgtcgaactcgcatcttactttcgcaaacaagcaacatacttttccccgctgcgacggacgatctcctcggcgttatttagaatctcccgcccctcgaacgcgccgtagatttgactaaacttcacgccgtcgagacgtcggaggatatcactcaccgtggcagccggcagcggtagcatattgggatagctccacatgaaagaaacggcgtttgctccgggcgccacctggacaatatcgccggataatagcaggccgtcgtcctgcgcccagtgcaggacgcagccaccagcaaaatgcccacccaggcgaatcagactggcatcggccgtcagttgtaggctatcgccctcccagaaggtaatccacgggctgtcgcgcatgacccactggcggtcatccccatgcagatagattggcgccttgaactccgccgcccaatcctgcatacaactgtagtaatgcggatgcgagatagcgatggctttcagcccacccagcgcggaaaccagcgtttttgtcgcctcatcaaggttggcgatgcagtcccacagaatattaccctgcggcgtacgcagcagaaatgcgcgctgattaatggcaaagccaggaatagttcgaatgctaaaaagcgcgctgttatgctgttgccacttattgctgtgcgatgcggtgagcttatttaatgtaatccactgttggccacccaccggaacaaattgccgttcgtcttcgcatatcgggcaatgttgcgcagggttttcgctaaattcgtacgaggtaccacaagctttgcaaagcgtaatcgtcatctcttcctctctattccagcatccgaaaataagcatggcacagcttattttagcggtgtggcagaatgtgcagagcacaggtttggctgcagattttcgccaaagcgccaatcggcgtggctggcgactaatagaacgattcaattttgtgatgtgatcagttaattctcaaaagcagggttggttaaggcagcgtttactcatgtacaattcgcgtcgtttgtgaaagtttaccggggtagagccgggttatggtttacgggagcgagtgtcgtacagaatgattgatatcagtattatgtcgatgtgcatggtagtgctgctggtgatgagcgtgttgctggagtaaccgtcccctactgtttttgtcagcttatgttacccctgaattggacataaaattatctcgctgcttctccagccgggaagcagtcaggctgcgccttaccatccggcaatacggcgtgtttatgccctttgtccggaggcagccgaaaaatttgccaaaatgggttcgcccgcgggtatccagcgggctttttttgtttgctcgcgtctattgcgggcataaaaaaaccgccgtggtgaacggcggtttactgtctcagagtgaatatgcgctcggcgtattaactcttcactttacggtagataaacagcacaacgattgcgccaatcaccgccacaacaaagctgccgaagttaaaaccgtcaaccttgccaaagccgaataacgtactgatccagccaccgactaccgcaccgataataccgaggatcacggtgacaataaatccaccgccgtctttgcccggcataatccacttagccaaaataccagcgatcagaccaaaaatgatccaggaaatgatacccatggttaactccgtcctctttgttaccgtgaaagtatttcgtaattaaaatagtagcataattataacgaatgatttaacaaatatatatttattagatgattgcttgccgtttcgctagccctggtctacagattattcagtgctcgttaataacgaaaggggtgaagaatggggtattacgtactgaaaaagtctgataagagcgtcccacagccgtggtattttctgctgaaggcggacaaccatgagaccatcgccaccagtgagatgtactcatcgaaagatgcggccaaaaagggcatcgcctcggtacagaaaaacggtgtcagcgaggtcattaaggacgaaacgcaataaacaagaaggggatgcaagtgcatccccttaaaatattctgccgaccgttacaccacggcggtggtcagtcgtgatgagcagcacaggcgcccctgctcatcggagatatcaatttgccacacctgatggcgcgaccccacatgcagcgcggtacagacgccacgcacccgcccgctgcgaaccgaacgaatgtggttggcattgacttccagtccgaccactttttgttccccttcggtacacagatagcccgcgaccgaacccagcgtttcagcaagaaccaccgatgcgccgccgtggagcaggccgaatggctgatgcgtgcggtgatcgaccggcattgttgcttcaatggcgttatcgctgatggccacaaagtgaatatccagcaggccaaccatgttcccctcgcccatcgcgttaagctgcggtagcgaagcctgacgtttccaaatcatccgataatctccagcagagcctgcagcgggtgacgcactccgctaccttcgatacgcttcacctgactgcggcaggaatagccggtggccaggcagcgattgcgtggtagacgcgccatcgcctgctgccacgaaagcgcgtaaatcgccaacgagttggcatggtttttcacttcatggccgtaggtacccgccataccgcagcaacctgtactgatgtactccattttcgccccgaagcgggcaaatatctccgcccactgtttgggcgcggccggtagtgcagtcacttccgtacagtggccaaacagataccagggttcaccgctgctgtcctggccggctgttggcgctatcgcctgggttagccattcatgcaccagcatcacgcgaaaatcgccgcgtttctcgcccagcgtctggttatattcatcgcgatagcagagcaccagcgcggggtcgacgccaaccatcggtatatccagccgcgctacgcggttgagaaaatcagcagttttctgcgcggtacgtgcaaagcgggtcaggaaccctttgatatgctgcgctttaccgttcggcgagaacggcaacagtaccggctgatagccgactttttcaatcaggcggacaaagtcagccaccacctgcgcttcgtagtagctggtaaacggatcctgtaccaccagcaccctcttcgcacgctgttcgacgctcatcgcttccagatcctcaagcgtggtattggctgagcgatggcctgccatctgctgcttgagtgatggcacggagagcagcggtagatcgaccatgccgatatgtttttccgacagcttgcgcatccacggctgattgataaagaagttgaatgttttcggcgcctgggccatcagcggcgcgtaggactcgaccgtcgcgaccagatggtcgcgtaccgggcgcaggtaacggctgtgataaagctgcaggaagcgggagcggaattccggcacgtcaatcttaatcggacactgggttgaacaggccttacaggccagacagccggacatggcctctttcacttcatgtgagaaatcatattcgcctttacgcgcatgccagctgttgcgggtacgctcgatcagggcgcgcaggcttacacctttctccggaagttcttgctccagtttgttcgggtctatcccgcggtcggccagcaggcgtaaccattcgcgcaccagcgtcgcgcggcctttcggcgaatggatacgctgattgctgaccttcattgacgggcacatcgggctttttacatcgaagttaaagcacagaccgttgccgttacactccatcgcgccgcgccaggcgctacgcacggcgatgggaatttggcgatcgtaggtgccgcgtttgacagcatcgactttcatcatcggcgcatcgacgccttccggtgggcaaattttccccggattcaatcggttatccggatcaaaagccgctttcactttacgcagttcgctatataactcctcgccaaagaaggcaggactgtactcggcgcggaaacctttaccgtgttcgccccacagcagaccgccatattttgccgtcaaggcgaccacctcatcggagatctgcttcatcagcacctcctgctgcggatcgcacatgtccaacgcaggacgaacgtgcagcacgccggcgtcaacgtgtccaaacatgccgtagctcagaccatggccgtcgagtaaagcacgaaactcggtgatgtagtccgccagatgttctggcggtacgcaagtatcttctgcaaaaggaatcggtttcgcagcgcctttagcattgcccagtagacctaccgcctttttacgcatggcatagatgcgctcaacgccatccagctcatgacagacctgccagccaatcaccccggcggcgccctgcgccatcagctcatcaagacgctgacacagggtggttacctggccgtctattaattccgcatcatcaccggcaaactcaacaatattgagccccagcatctctttttccggcacatcggcgatcagttcgctcaccgagtgccagacgatatcttcgcgcgccagattaaggaccttcgaatcgacggtctccaccgacagcgcctttgcttcaaccatgaagggggcgttacgcagcgccgaatcaaaagagtcatacttgacgttgaccaaccggcgtaccttcggcagtcgcgtaatatcgagccgcgcttcggtaataaatgccaacgtgccttcggagccggtcagaatgcgcgtcaggtcgaactcgctcatctcatcattgaacacgtgacgcaaatcgtagccggtcaggaagcggttcagttttgggaatttatcgaggatcagctgacgctgcgctttgcagcgctgatagacggtacggtagatgcggccaatcgctgactgctcgcgccccagcgtttccgccagcgcggcgggaatgggtaaggtatcaaggatatcgccgcccataagaaccgaccgcactccaagcacatggtcagaggttttaccgtagaccaatgacccctgtccggaagcatcagtattgatcattccgccgagcgtcgcgcggttactggtcgacagctctggggcgaagaaatagccgtagggcttaagaaactggttaagctggtctttgattaccccggcttcgacccgcacccacccctcttcaggattgatttcgataatacggttcatgtaacgcgacatatcgacgatgatccccgcgttcagcgcttgaccattggtaccggtaccgccgccgcgtggcgtaaaaatcagcgatttaaagcgcggctccgctgccaggcgcgccagtaaggcgacgtctgcggtggaacggggaaacaaaatggcgtccggcaacagctgatagacgctgttatcggtcgccatggtgagtcggtcggcgtagctggtggcggtatcgccggtgaaaccttgttgctccagtacctgcaaaaaattcagcaccagttggacgacgcccggcgcttgagaaatctgtgggatcatgacgcttgaccctgcctgaatatgttgtgtttagatgatgtaataatgcgcaaactaaacgtttgcgtggcgcactcaactttttatcacatttttttcatatccgcccacgagatttacgggcaaaatcaggcgcgcgaaattattgatattattatctgtacatggaattacgctgcgtcagcattgagacgcgactggaaaggtaaattttctctatgattaaccaacatcagccccgggacataccgcaaattctgctgtcggtgctgtttttgtccctgataattatttcctgcctgtgggttgtgcaaccatttattctctccttcgcctgggccggtaccgtggtcatcgccacctggccggtgctgctgcgcctgcagagaattctatttggtaaacgcgcgctggcggtgctggtaatgacgctgctgctttttttactgttcgtcattcccattgccttattggtaaatagcctggtcgataatagcgccccgctgattaaaatcgtcagcaccggccaggtaacgctgccggatttcgcctggctgaattcgattccgctgatcggcgataaactctattccgcctggcatagcctgctggagatgggcggcgcggcgattatggctaaggttcgcccttatattggcgccaccaccacctggtttgtcggccaggcggcgcacattggtaaactgctggtttactgcggactgatgctgttgttcagcgccctgctttactggcgcggcgagcgcgtcgcctatggcttccgctatttcgcgacccgtctggcctcaaagcgtggcgatgctgcggtggtcctcgccgggcaggcggtacgcgccgtggcgctgggcgtggttgtcaccgcgctggcgcaggcggttctcggcggtatcggtttggcgataagcggcgtgccttacgccgcgctgttgaccgtagtaatgattttcacctgtctggtacagctggggccgcttatcgtcctggtgccctcgattatctggctgtactggaccggcgatacgacttggggcacggtgctgctggtctggagctgcgtggtgggtacgatggataacgtgattcgcccggtacttattcgcatgggcgccgacctgccgatgattctgattctctccggcgttattggcggactgatcgccttcggcatgattggcctgtttatcggcccggtgctgttggccgtctcctggcgtctgtacgacgcctgggtgcaagaagcgccgccgccgccgctcgatccggatttggttctggcggaactcgccgagctgaatgccagccataacaaaagcgaaaagtaacagaaaggcggggaaacccgccttaaacttaagctaaatttatcaatctcccgccacttccgtctttttcatgttccagctcgacgtttatctctcatattcttcacactgatttaactattgagaggaatccgatcgacgccaacagccctgatgcctactattagcccacggttatagatcaagatattgatttataagcatggaaatccctgagtgaaacaacgaattgctgtgtgtagtctttgcccatctcccacgatgggcttttttttatgtcaaaatcaaatagcgaaacgttcctgaaggcaaaaaaatccccggcatctctgccagggattgtgttatccgcgttgaacctatttattcagttcagccagacctaaccaggtttgcaccacggtatccgggttcagggacaggctatcgatcccctcttccatcagccaggcggcaaagtcttcgtggtcggacggaccctggccgcagatgcccacgtatttgccctgttttttcgccgcgcggatggccatcgacagcagcgctttcaccgcgtcgttgcgttcatcaaacagctcagacacgacgccggagtcgcgatcgaggcccagcgccagctgcgtcatgtcgttcgagccaatcgagaagccatcgaagtactcgaggaactgctccgccagcagcgcgttcgacgggatttcgcacatcatgatgatcttcaacccgttctcgccgcgcttcagtccctgacgttccagctcttcgaccaccgctttcgcctgcgccacggtacgtacgaatggcaccatcacttccacgttggtcaggcccatgtcgttacgcacgcgtttcattgcttcacactccagcgcgaagcaatcgcggaagctttctgaaacgtagcgtccggcgccgcggaatccgagcatcgggttctcttcttccggctcgtaacgctcgccgcccaccaggttggcgtactcgttagatttgaagtcggacaaacgcacgatcacccgtttcgggtagaaggcggcgccaagggtagcgatcccttcggtaaggcggccaacgtagaactctctcggtgagtcgtagcctttcatcagctcgcggatttcgttctgcaggcccggctcctggtcgtcaaactccagcagcgcgcgcgggtgaacgccaatcatgcggttgatgatgaattccagacgcgccaggcccacgccttcattcggcaggcaggcgaagtcaaaggcgcgatccgggttgccgacgttcatcatcaccttcagcggcagattcggcatctcgccaacgcttgagctcttcacgctgaagtccagtagctccgcgtagacatagccggtgtcgccttcagcgcaggaaacggtgacgttctggttttcctggatgcgatcggtcgcatcgccgcagccgaccaccgcagggatgcccagctcacgggcgataatcgccgcgtggcaggtacgcccgccgcggttggtgacgattgccgaggctttcttcatgatcggttcccaatccggatcggtcatgtcggtgaccagcacgtcgccaggctcgatgcggttcatctcactgatatcgtggataaccttgaccgggccggcgccgatacggtggccgatggctcgcccttcggcaatgatctgcccctgggcatgcagcgtataacgctccatcacctgaccgcgcgaacgaaccgtttccgggcgcgcctggacgataaacagcttaccggtatggccatctttcgcccactcgatatccatcgggcgaccgtagtgcttctcgatctgcaccgcctgcttcgccagctcttccacttcctcgttggttaacgagaaaacatcacgctgcgcctgcggcacatcttcgatgcgcacctgcttgccgtgttcctgagtcggcgcgtataccatgcggatttttttcgaccccatggtacggcgcacgatagccgggcgattagccgccagggtcggtttatggacgtaaaattcgtccgggttcaccgcgccctgcaccaccatctcaccgagcccccacgccgaggtgataaacaccacctggtcgaaaccggactcggtatcgatggagaacatcacgcctgaggaggccaggtcggagcgcaccatcctctgcaccccggcggatagcgccacgccgcggtgatcgtaaccctgatgcacgcgataggagatcgcgcgatcgttaaacagtgaagcaaagacgtgcttcacggcaacgagcacggcgtcaaagccctgcacgttgaggaatgtctcttgctgaccggcgaaggaagcatccggcatatcttccgccgtcgcggaagagcgcacggcgaacgaggcctcggcgtcatcggcggacagcaggtcataagcttcgcgaatcgcgttttccagttcgctctggaagggggtgtcgatgatccattgacggatctgcgcgcccgctttcgctaatgcggaaacgtcgtcaatgtcggtttcatccagcagtgcataaatgcgctggttaacaccgctttggtccaggaactgatcgaaagcatcagcggtggtggcgaacccgtttggtacggagacacccataccggacaggttagtaatcatttcaccaagggaggcatttttgcccccaactctgtctacatcattcatgccgagttggttataccaaagcaccagcggtgacgagccattgttggacatcgagacaatccttttgtgatttaatacaaattatagaaaacacacgatcgactacggtattcatcctgacatatttatgccgctgaaaaaaacggtgaatcgttcaagcaaattaattttctgtttttcggattgttttccagaattgtctaactctatgattaaaatgaactctattgatatttgatacaaataatgggcaaaatcagaaactggacctgccatttcattaaaaacaaaaatagcgtttcatttttttaagtgagacaaaggttaaagctctgtgcttaaatttactctgcttttagataattataccggatggtcaaaatggacagtgctgtagatcgccacgtattttatatttctgacggtaccgctattacggcggaagttttaggtcatgcggtaatgtcgcaattcccggtggctatcagtagcgtaaccctgccgttcgtcgaaaacgtcagccgcgcccgggcggttaaagagcaaatcgatgccatttttcaacaaaccggcatccggccgctggttttctattccatcgttatccccgaaattcgcgacattattttgcaaagcgaggggttttgtcaggatatcgtgcaggcgctggtagccccgctgcaacaagagttacatctggatcccacgccggtggctcaccgcacccacggcctgaatcccggtaacctgattaaatacgatgcgcgtatcgccgccatcgattacacgcttgcccacgatgatggcatctcgctgcgcaatctcgatcaggcgcaggtgatcctgctcggcgtttcgcgctgcggcaaaacgccgaccagcctgtatctggccatgcaatacggtattcgcgccgctaactacccttttatcgccgacgatatggacaatctggttctcccggcctcgttaaagccgctgcagcacaagatgttcggcctgacgattaacccggagcgactggcggcaatccgcgaagagcgccgggaaaatagccgctacgcctcgttgcgccagtgccgcatggaagtgactgaagtcgaagcgttgtaccgcaaaaacaagatcccctgcctcaacagcaccaactattcggtagaggaaattgccaccaaaatcatggatatcatggggctgaatcgcaggatgtactaatacactagtacattattgaaaatttgtttatgctatcgctcgtggcctatacaggatcatgccctgctcttgcaataagcagggattggtttatcgtgatgcgcatcacttcccggcattttcgccgcggaagaaacagatttttgagaccccaatgaataaaacagacgaattgcgtaccgcgcgcattgaaagcctggtaacgcccgcggaactggcgcagcgccatcccgtgtcggccgaggttgccgcccacgtctccgcctcccgccggcggattgaaaagatcctcaacggcgaagaccgccgcctgctggtgattatcggcccctgctccattcacgaccctgaagcggcgatggaatatgcgcgccgtctgcagagcatgcgcgaacgttaccagccgcagttggaaattgtcatgcgcacctatttcgaaaaaccacgcaccgtcgtgggctggaaaggccttatttccgatcctgacctcaacggcagctaccgggtcaatcacggtatcgaactggcgcgtcgtctgctgctgcagatcaacgagctgggtatcccaaccgctaccgaattcctggatatggtgaccgggcagtttatcgccgatctgattagctggggtgccatcggcgcgcgcaccaccgaaagccaaatccaccgcgagatggcctcagcgctctcctgcccggttggttttaaaaacggtaccgacggcaacacccgcatcgcggtcgacgcgattcgcgcttcgcgcgccagccatatgttcctgtcgccggataaacagggccagatgaccatctaccagaccagcggtaacccgtacggccatatcattatgcgcggcggcaaacggccaaattatcatgctgcggatattgccgccgccggtgaagcgctacgcgaattcgatctccctgagcaactggtcgtcgacttcagccatggcaattgtcagaagcagcatcgccgtcaactggaagtgtgcgccaatatctgccagcagatccgcgagggttccaccgccattgccgggatcatggcggagagcttcctcgccgaaggtacgcaaaaagtgatccccggtcagccgctgacctggggccagtcgattaccgacccgtgcctgagctgggaagatagcgaaaaaatgctcgccgaactggcagcagccaccgctacacggttgtaatccctctcccgccgcgctcgcggcgggttttcaccgctcgccgttcatcctctgcgcaatagctacctgaaatggtaagcaacaacaaaaaagacttgccgtgaaaattaacattactgataatgattatcattgttgcttttatttttattttggtgctatgacgcgtatggataacactgccacagcagagaaaacaaaagacaatgctccctatccccttgccagcgatcgccaaatcagcagccggacgctgttgggtgcggaaggtcgcgtggtgatcgaacatgacggccagcgctatctgctgcgccagacccacgccggtaagctaattttgaccaaataaaaccccgcgcaatggcggggttttgcggttagctggagcagctgacttccagatgtttaccccaatcaggcgggcggctggcgtaatcatcagtacgatcggcgaaaggctgcgcgagggcttcatgcagacgttccagctcgcccatgtcgccatcttcggctttttctatcgcccgctgcgccagccagttgcgtagcaccagcgctgggttgacgccctgcatccgctgctggcgttcgctatcgtcgatctgttcatcacgtagccgcgcccggtagtcggcaaaccagctatcaaacgccgcgcggtcgataaactcatcgcgcagcggcgatgccgcgctgtgctgctcgctttggctcagcatccggaaggtacgggtgtagtcactcccttcacgctccatcaggctgaacagtccatcaagcagcgtgttatcgccagtttgctgagtatagaagccgagtttgtcgcgcatgcggcggccgtaggcagtcaataaggcaggctgatagccatccagcgccgcgttcagcgcgtcggcgctgataaacggcgagagcgactgggccagacgctgcaggttccacaaccctaccgccggttgattatcaaagctgtagcgcccctggtaatcagagtggttacagataaacccgggctggaaatcatcgaggaagccatacggaccataatccatggtcaggccaagaatcgacatattatcggtattcatcaccccgtgggcaaagccaacggtctgccagctggctatcatctccgcggcacgcgtgacaacgtcacggaaccagagaatatacttatccgcctcctgctgcagctgcggccagtggtgttcaatcacataatctgccagctgctgcactttttccgcttcgcgacgatagtaaaaatgttcgaaatggccgaagcgtacgtgactttcggcgatgcgcatcagcatcgtgccgcgttcttcgcgttcgcggtaaaccggcgtgtcactggtcaccatcgccagcgcgcgggtggttgggatccccagcgcatgcattgcttcgctggcaaggctttcgcggatggtcgagcgcagtaccgcccggccatcgcccattctcgaatagggcgtcagaccggcgcctttaagatgccagtcaaaacgttgaccatccggcaactgctgctcgccaagcagaattccgcgaccgtcgccaagctgaccggcccaggcgccgaactgatggccgctatagacctgcgccagcggcgacatccccggcagcaccgcttcgccgccccagacgcccgccccatgttgcggattaaataacgtctccgggacgcccagcgtttgcgccaaagcggtgttgcgccagatgagacgcgtgttatccagcggcgtgggcgccagtgatgtgtaaaaacccggcagccgatcgcgccagtgagtagtaaaagacagggtcatggttcctcctggcgccagtgtagtgccttcaacaggggattaacacgggctaactgcagggttatggcaattaaaaaagggagctctcgctcccttttctcgccgaatgcggtttaaatgcgcctcgcctgccagaatttcttgttccagtagacgttgtccagcgacgagcgggtaacgccctggctggtggaggcgtgaataaattgattgtcggtatcatagataccgacgtgcaggccgctttcgccggaaccggttttgaagaacaccaggtcgccgggcaacagatcgcttttatcaatacgcgtgccgatttccgcctgctcgcgagtttcccgcggcagctgcatggcgaatttgtcgcggaatgtgcgaaccacaaagccagagcagtcgacgccccgcggcgtcatgccgccatagcggtatggcgccccacgccagttgcgcaattgctcattcagattcgccaccacggtaatggaatcagccagccgtggattcggcggcggcgcgcggtggctgctacagcctgccagcaccatcgccgcaataaaaatgaaccacacacgcatctcagacgattcctctgttccctgtcctgttattgcaataatttagcctgtttagcggcgtacaggcaagatccttacccgctactgtgacgccacgagcataagatgacccgcgacttccacccgctggaaagcgatatgataagcggcggtcaaattttcctcacttaacacctcatacgtttccccgcaggcaatcatctgcccctcacaaatgagccacgccctctgcgcgtgtcgcaacgtatggttgagatcgtggctgctcatcacgatagcgatccccagcgcgcacagcgacgccagcacgctatccagcgccgcctgctgcgccacatcgaggctgttcatcggttcatccaataataacagctgcccggcgggattcgcgcgccggtgaatctgcaggatcaccgccgccagacgcacccgctgccactcgccgccggagatctggttgacctggcgccccagtttatcgcttaaccccagtagcccggcgatctcgttgagcaacccctgcggggcgctatcctgcatatgtaacgacagataatgccacaccggcatcgcgaagggagggagctgctgctggctcagataggcgcgatggcgggcaagctccgctgcgggccacttatccagcgcccgctggttaagcgtaatcagaccggggccggaggtcagcccggccatccgcgccagcagggtacttttgcccgcgccattgggccccacgagatgaattatctcaccgggccgaacgtcagcggtaaacggcgacaaccgccccgcttccgctacatcctgtagctgcatcaaaaacggcattattgcgctaatgctccttttagcgcagccagcagttgcggatcgtccggcgtcatatccggcgagaaacgctgaatgacctggccatcgcggccaacgaggaatttttcaaagttccacaggatgtcatcaacgtacagcggtgcgcgccctttactggccatccgctcataaaacccgctcccttgcggtgcgacggccttcggagcggcggcaatcaatttttgatacagcggcgcgcgatgttcgccgttgacgtcaattttactgaacagcgggaaggtgacgccgtaggtcatgctgcagaacgttttaatttcttcttcgctgcccggctcctggccgagaaactggttacaagggaagccaaggacgctgaatccctgcggtgcaaactcttcctgcagcgcttccagttgctcatactgcggcgtgaggccgcattttgaggccacgttaacgatcagcagcacctttccggcatacgctgccaaggtggttttctcgccatcaatggtcgtcacttcggtattaagaatgtcgtgttgcatagccttccctcagtcaataatgcggttaaggagatccctatctactgtagcggattcaacacgcttgattctactttgattcgcgggcaaatgtcgcttgatgtgacagcgctacgcttgccgacgacaacatgaattcctctcaatatcagcaacggataaatgagtgtacagtgtgaaatagatgtaatagtgtttcgttacttgttaatttatgagagtttttagagatgaagaagttgttaagctcggtgttaatcgtcacatcggtggcgctgttatccgcctgctctccggacgataacaataaggttaaagtcgcgatcaataccggcccggatgaagctatctggaaagtcgtagagcaggtagcaaaagacaaatataacctcgacgttgaggttatctcttttaatgattacgtcctgccgaatgaagcgttaaataataaggatgtcgacgctaacgctttccagacgctgccctatctcgaagcgcagtcgaaagagcgcggctataaattcgccatcgtcggtaaaacattcgtcttcccgattgccgcctattcgcgcaaaatcaaaaatatcagtgaactgcctgacggcgcgaccgtctctatctctaacgaaaccaccacgcttggccgcagcctgctgctgttacaggcacaaggattaatcaagttgaaagacggtgtaggctatctgcccaccacgctggatatcattgataacccgaaacacctgaagattgttgaagtcgatactccgcaactgacccgtacgcttgacgatccgaacgtgacgctggccatcatcaatactaatttctcggcgcaggtcggtttatccgccgcccgcgatggcctgtttatggaagggccggattcaccttatgtcaatgcgattgtggcgcgcgaagacaataaagacagcaagaaaattcaggagctgaaagaggccttccagaccagggaagtcgccgataaagcgcaggaagtttataaaggcgatgccatcaaaggctggtaatcgtcacccgacgccgtccattatgacggcgtcaccctatcctctccgtccagaatgcaatagcagccagatgaatactggcgccccagcgtcgccgtcaccacgccgatcggtaattccgccgccgacagcgccagccgggcgatgatatcggcgccgagcagcgcgctggcgccagctaacaggcaggcgggaagcagcacccgatgatcgctcaggccgcacaggcgcaaaatatgcgggatcaccagaccaataaagccaatcgccccgccagcgccacgctgacgccgaccagccagccggtggccaccaccagtaatttccgccatagccacagcggcaggccgagctgacgcgccgagacttcgcccaacgccaataaattcagcggctgcgactgccagcatacccacagcagcaccggtagcagcgccagcatcagccacagctgctgccagtcgacaccgccaaaaccgcccatcatccagtacatcagctggcgcaggtcaaaagaggttgagaaatagaccgcccaggtcatcaacgcgctacaaataataccgagcgcgacgcccgccagcagcagacggctggtagacaggtgacgccgggcgaaacggagcagaataaaggtaatcagcagcgcgccggcaatggcgcacagccccagcgcccacatgggtaacacgccttgacctaacagcacggcggcaatcagcccaacgcccgcgccgttagagacgcccaacagtcccggctccgccagcgggttttcaaacagcgcctgcatgatcgctccggaaagcgccagcgccgccccactaacagcaccgccagcgtgcggggcagacggatttgccagatgaacaactcgcctttggcgctaaaccactcctgcggcgggatccattggtcgccggcgcacaggctaatagtcaatgtgacgagcaggatcagcgttaaggcggttagccaacgacggttatgacgctgttgaatatcggcgaagatctgcataagtcccggaggcaagtgagcgaggtgattgattttacggtggcgatggcgggagaaaaggaaaaactcagagtcattcccacgctggcgcctgcgctcctcgtgacgccagcgtgggaatggaatttacaccaatacctggaacagtagcgcgaagagaatgatattcgccaccacaatcgcccagccgttatagagcatgtatttcaggtgggtagactgcgccagccccatttgaccaaacatatccgaagagggaatgggccaaaccagtcgacctgcgaagaggccagcagtaccgccgtagttccctgcggcggcacgccggcggccatcagcatcgggccgaaaattttgtgggtgaaggtcatctgcgctaccgccgccccggtacgtgaccaataatattgaaagcgaagatgcaaaagcacagccaggcaggcgaaatgccttccagcagcggctgggtatagtcgagcagcccctgataggcatgaaggccatccatcagctccaggatcgggttatacaaccagtagaggataaacatccacaccagacggccacaaccgtggtacagcgcctgcaggatctgcgtcggacgcagtccgcccaccagcccggtaatcaaggccaccagcagcatcacgataatcgcaaagctaaatccggctttaatcaccacgccaataaccgccatcacaataatcgttgccgcgaaggccagcgcgctgagcttacgccgacgtagctgtgcggcgctcagtgcttctgttggcttctccgtgagatcgacttcatagcgtagtttgccttcggtcatcttctggatccgccctgccatcacccagccggccagcagcgtcaccgcgctcatcggtagacccacgtacagcagataatccggatagctcaatccgccgaggctcaggatagtcacggtactgggcgtaaacggcccggtaaacaatcccacggagccggcggtcatcatcagcgcggccaccgtcggcggcgttaagcgtaccgcagccgccaccgggatgatgaccgcgacaataatcgcgttaccaccagccatcgttcccagcgatccgcagattaaaatcgaggaaaccacaatgccaaacttcactcgggtctggctggaaaggccgatgcggtgaaccacaaatttcactaactcaaccgcagcgccggtacgggtggcgacttcacccaccccggcgccgagcataataatcagcccgacggtggcaataaatgaaccggtggatttcgccagcatggtgcccatttccggcaatccggtggaggtcataatcatggcgataataatcgaagaaatcaccgccagaacgatgtcgacgccgaccagcgacagcaccgctaacgccactaatggcgtaaaacccagcaggccgagttcactgctcgggcggccatggcaccaccacgcggtcaacacaaacagcagcagtaacaagccaataacaacgttttttctcgtgatatttcgtctggcgagggaattgccagcgagcgttgagtcactcatataactccttaaagccattaaaaccgaccgcaattgcaggtggcgtattcgggcctgctcagaaaatatccccctcgttatcattattggctcgatggcctgagggtttgtagggaacaaagggaatggttctgagaacgtaaaagtccgtctgaagacgggaccagcagcgcaatatgtaaccggagcgctgattggtgattaaatttatgttaatttagtgttagtagaaaatgactttttatcggcaagctataaccctgagttaactgttcatgaaactgcgccatctggaaatcttctacgccgtgatgacttgcggctctctttcacgcgcggcggaatcgctgaatatctcccagccggccgccagtaaagcgttaaaaaacgccgagcttaagctcggctttaagctgtttcagcgggtacggggcaagctgctgccaactagtgaagcgctcacactttttgaaaaagcgcagagcatttatcaggatctcgataacctgcgactgctggcggataatctggcccgcgacccacgcgccaaaatcaccttaggctgtttaccaagcctcggattaagcctggtaccggagctggtgaccgatttttatcagcaaaacagtaatctggtgatgaccttaaccaccgagcatactgagacgttggtcaagaaattggatctgcgcgaaatagatttagcgctgacgctgcagccggtccaacagggagagatcatcaccaccctgattgccgaagtgccgctggtctatatcgaccgcgactaccgacaaggcgcggttgacatcaaggagatcgatcagcagcgctggatctcgccggggccgcattcgctctctgccgccatcgccacccgccgtgatttttccactacccggcttaacgtgcagacctactacatggccaccgagttcgtgaagcgcggcatcggctgcagtatcaccgatatcttctcggcgcggcataatctgtcgccggagatgattcaccccattacgccgccgatgaaaattaacctttgcctgctgcgtcgcgccgatgtttcgctcagcccaatcacgcagaaatttgtcgattttctgtgtcgacaactgcgtcaacagctcaaagaaattaacctgcagttataccctgaccataaaaagtcaattgcgccgctggggtaaatgctttgacataaccgcaagatatttatcagcggtggatatatcaggttatgaaaaaacgcattgtgattatcggcggcggcgtggtggggctggccaccgcctgggtattaattaagagcggacaccaggtgcagctactggagcgtaacgccgagccgggcagcgccaccagcttcgccaacggcgggcaattaagctaccgctacgtcgcgccgcttgccgaccgcggcgtcccctgcaggggattaaatggatgggcaaagccgattcgccgctgaatatgcgcctgcaaatgtctttccagcagtggcgctggctgttgcagttcctgcgcgcctgcaacagccaaagcaacaaaattaacggcgatcatattttgcgcttatccctgctcagccgtcaggtcatgcagtcgtggcttgatgaagataatcttgctgattttcactggcggcgtagcggtaaactcattatccatcgccgggagtacgactttcataaagcggcaaaagggattaatccccagtatcagcatgcgctgagcgccgaagcctgcctgcagctggaaccggcgctgaaacacatcaaccattcgctacaaggcgggatttattcaccgggagatgaaacggcagactgccataaattctgcctcgccctgctcgccaaactcaatgccagcagcaacttcagcctgctcacccactgcgaggtgctgcggctcaataagcgcgacgggcgcatcagttcgcttgagaccagccgcggtacaataaccggcgatgattatgtcgtcgccgccggcaacggtagcggcccactgctgggtcatctgggcgtgcgcgtgccgctgtgcgcgctgaagggatacagccttacccttccctaccctaaagaggccgggatcgcgccggatatcagcgtgaccgactacggacacaaaatcgtttacgcccgcctgggcgatcggttacgcatcgcggcgatggtggatatcggctacgacggtgaagaaatacgggatagccgcgttcaggcgctgaaaaatatcgtcgcgaatagcttccccgatctgcaggggctggatgaggctgaagcctggaccggtatgcgcccgtcgacgccagcgggcccaccgatgctggggcgcgccggataccagaatctgtggatgaatctcggccagggtagccttggttttacgctcgctgccggcagcgccgtgatactgggagcactcctcaatggcgaagcgccggcaatttctttagatggtctgacatggaaacaatccgcatgacaattattcgtaataatccgcaaccccgcctttccgccagcgtcgagtacggcaacctggtgtttctctccggccaaacgccgaaaagcagcgctgatgatattgcgctgcaaacccgcgaagtactggagaagatcgacgccctgctggtcgccgccggtagcgacaagcagcacatcctttccgcacagatctggcttaaagatatctcacgcgattttgccgcgtttaatgaggtctgggtaaagtggatgccggaaggccatagcccggcgcgggcagccgttcaggccgagatggcgcggcccgacatcctggtggaaatcatggtcaccgccgtaaaagcgtaatataaaacaggtaagaaaaaaggccgcatagcggcctttttaattagtcagtccagattatttctctctgggtgaagcgttttcgacacggctttttaacttctgtccgggtctgaaggtcaccacacgccgggctgtaatgggaatatcttccccgttttcgggttacgtcccgggcgttggttcttatcacgcaaatcgaagttgccaaacccggagagttttacctgttctccgttttccagagcacgacggatctcttcgaaaaacaactctaccagttctttggcatcccgcttgctaagcccaagcttatcaaacagatattctgacatttcagcttttgtaagcgccataggttcaatccctcaatgatgcctggaatcgctctcttaatgcctctacacatttggcaacggtagcggcaatctcctcttcttcgagtgtacggctggtatcctgaaggatcaggctaatcgcaaggctcttaaagccttccgccacacccttaccacggtacacgtcaaataagtttacgccaactacctgatttacgccaactttcttacattcggccaaaacatcggctgcagggacgttttccgcgaccagtatcgcgatatcgcgacggttcgccgggaagcgagaaatttcgcgcgcctgaggcaccacgcggtctgcaagcttgttccactcgatttcaaacaccagagtgcggccgttgagatccagtttacgttccagttccggatgaacaaccccaatgaaaccaatgcgttcacctttcagataaatcgccgcggattgtcccggatgcagtgcggtggccgcttctgcgcggaattcgatatcggctaatttaccggtcagatcaagaacagactccagatcgcctttcaaatcatagaaatcgacggtttcttttgccaggttccagtgctcttcatagcggttaccgctaatcaccccggccagcatcacatcctgacgaatgcccagcggcgcctgagtatcaggcacgaagcgcagaccgctttcaaagatgcgcacgcggctctgttgacggttctggttatagacgacggtgcccaacagaccggtccacagcgacaggcgcatcgccgacatttcgctggagatcgggcttggcagaatcagcgcttcttcaccggcatggattagctgctgtactttcgggtcaacaaagctgtaggtaatgacttcctgataacctttgtcgttaagcagcgttttcacgcgcttcagcgacaggtccgcttcacggtgagttcccatgatgagacccgcctgtaccggctcgtcaggaatgttgttgtagccgtagacgcgggccacttcttcaaccagatcttcttcgatctccatatcgaaacgccagcttggcgcaacggcctgccactcgtcctgaccaacggtcacttcacaacccaggcgttgcagaatgtcgctgacctgcgcgtcatcaatatgatggccaatcaggcgatccagcttgctgcggcgcagggtgatggtggcgcgttttggcagcgtctcttcgttagtcacatcgataattgggccggcttcaccgccgcacaggtcgatcagcagacgggttgcacgttccagcgctttatactgcagagccggatcgacgccgcgctcgtagcggtgggatgcatcggtgtgcaggccatgacggcgcgcgcgaccggtgatagacagcgggctgaagaacgcacattccaacagcacgttctgggtttcatcgttaacgccggaatgttcgccgccgaagataccgcccatcgccagcgctttcttatggtcagcaatgaccaaagtatcactatcgagcttagcttcagagccgtccagcagcaccagcgtttcgccctctttcgccatccgcaccacgataccgccgtcaatgcggtcgcggtcaaaggcgtgcatcggctggcccagttcaagcagcacgtagttggtcacgtcaaccaccgcatcaatagaacggataccgcagcggcgcagtttttctttcatccacagcggggtcggcgctttggcgttgatgcctttcaccacgcggcccagataacgcgggcacgcctgcggcgcctcaacctgaatcggcagcacgtcgtcaatggtcgcggcaaccggagtgatttccggcgcgttcagcgacgctttgttcagcacagcgacatcgcgcgccacgccgatgatacccaggcagtcggcgcggtttggcgtaacgctgatttcgatggtgttgtcgtcaagcttgaggtattcgcgaatgtcggtaccgatcggcgcatcggccggcagttcgatgataccgctatgatcatcggaaatacccagctcggagaaagagcacagcatcccttctgacggttcgccgcgcagtttcgccgctttaattttaaaatcgcccggcagtacggcgccaatggtcgcgacggccaccttcaggccctgacggcagtttggcgcgccgcagacgatgtccagcagacgctcgccgccgacattgactttagtaacgcgcagtttgtcagcattcggatgctggccgcactcgaccacttcaccgacgaccacgccgttgaagctaccggccaccggctcaacgccgtcaacttccagacccgccatcgtaatctgatcggacagcgcttcgctgtcgatcgccgggttaacccattcgcgtaaccacagttcactgaatttcattgttctgtcctgcccttatttaaactgtttgaggaaacgcagatcgttttcgaagaatgcgcgcaaatcggtcacgccataacgcagcatggtcagacgctccatgcccatgccgaaggcaaagccggagtaaacttccggatcgatgccgacgttacgcagtacgttcgggtgcaccatgccgcagcccagtacttccagccatttaccgtttttacccataacgtcaacttctgcagacggctcggtgaacgggaagtaggacggacggaagcgtacctgcagatcttcttcgaagaagttattcaggaaatcgtgcagggtacctttcagattggtgaagctgatgttcttatcaacaatcaggccttccatctgatggaacatcggagtgtgggtctgatcgtaatcgttacgatagacgcggcccggcgcgataatacgaataggcggctgctggttttccatagtgcggatctgcacgccagaagtctgagtacgcagcagacgggtcgcatcgaaccagaaggtatcatggtcggcgcgagccggatggtgacccggaatgttcagcgcatcgaagttatgatagtcatcttcgatttccgggccagtcgccacggtaaagccaagttcgccgaagaagttttcgatacggtcgatggtgcgggtaaccggatgtaaaccgccgttttcgatgcggcgacccggcagcgagacgtcgatggtctctgccgccagacgggcattgagcgcggcgccttccagctcagccttacgcgcgttcagcgcctgctgcacctgctctttcgcttcgttaatgaccgcacccgctgccggacgctcttccggcggcaactcacgcagggtggtcatttgcagggtcagatgcccttttttacccagatattcaacgcggacgttgtccagcgcggcaacatctgatgcctcgttaatggctgccttggcactggcaaccagctctgcgagatgtgacatggttttcctcattatgtcggtgcagacaccggttttagtgaaataaatatcccgaatctatatacgaaaaaagcctccacaggggaggctttctggcgctgttttccgtttcttctttcacgcgctagcctcctgagttcaggtgctaaagtaaaaaaagaagcggaaaatagcagcattcatgcttgcattaccttgtctggtaagaaatgtcagacttgtattgaaaagcctgcacggataaaagtcaatgtattgatagtgttgaaacgaaaagagggagacaagctccctctttcaactggcttatgccagagctgctttcgctttttcgaccagagcggtgaacgctaatttgtcgaatacggcgatgtcagccaggatcttacggtcgatttcaacagaggcttttttcaggccgttgatgaatttgctgtaagaaataccgttctgacgtgctgctgcgttgatacgcgcaatccacagttggcggaactgacgctttttctgacgacggtcacgataagcgtactgaccagctttgataacagcctggaaggcaacgcggtatacgcgagaacgcgcaccgtagtaacctttagcttgtttcaaaattttcttgtgacgtgcacgggcaactacaccacgttttacgcgagccatatgtgctctcctgtatctattctaattaaaaagttaaaagggttaacgacttatgcgtacggcaggcacgcgattaccaggcccagatcgcctttggaaaccatggctttcggacgcaggtgacgtttacgcttggtagcttttttggtcagaatgtgacgcaggttagcgtgcttgtgcttaaaaccacctttaccggtttttttgaagcgctttgcagcaccgcgtacggtcttaatttttggcattttaataacttccacttcgcattgttaataaacgaaacaaaggcgaacaaaccagtgagccgaagcccaccggaatgttacttgatggccttactgtttcttcttcggagcgagcaccatgatcatctggcggccttcgatcttcgttgggaaggattcgactactgccagttcaaccagatcgtctttcacgcgattaagcacttccataccgatctgttggtgggccatctcacgaccgcggaaacgcagcgtgatcttggccttatcgccatcttcgagaaagcgaatcaggctgcggagttttacctgatagtcaccttcatcagtaccagggcggaatttaatttccttaacctggataactttctgcttcttcttctgttccttagaagacttactcttttcataaaggaacttgccgtagtccatgatacgacaaactggcggttcggcgttagggctgatttcaactaaatctactccagcctcttcagctttttcgatagcttctctcagactcacaatacccagctgctcaccttccagaccagttaagcgaacttcctgggcgcgaatctcgccattaatacgattcggacgtgccgtttgaactcgttttccgcctttaataccttattcctccagttgttgaagactgcggctgcgaatctcttgttgcagcttctcgatcacttcatttacgtccatgctgccgaggtctttaccgcgacgggtacgcacggccactttgccggcttcgacttctttgtcgccacagaccaacatatacgggacacgacgtaaagtgtgctcgcggattttaaagccaatcttctcatttctcaagtccgcttttacgcgaatgcccgcattttgtagtttacgcgtcaattcgttaacgtattcagactgagaatcagtaatattcatgaccactacctgcactggcgcaagccaggttgggaagaagccagcgaactcttcggtcaggatgccgatgaagcgctccagcgaaccgagaatcgcgcggtgaatcattaccggtacctgacgctcgttgttttcgccaacataagaggcgcttaaacgctgcggcagggagaagtccagctgtacagtaccgcactgccatgcacgatcgaggcagtcatacagggtaaattcaattttcgggccgtagaatgccccttcgcccaattgatattcaaatgggatattgttttcttccagcgccaccgccagatccgcttccgcgcgatcccaggtctcatcgctaccgatacgtttttccgggcgagtagacagcttgacgacgattttctcgaagccaaaagtgctgtacatatcataaaccatacgaatacaggcgttcacttcatcgcgaacctgatcttcagtacagaagatatgcgcatcatcctgagtaaagccacgaacgcgcatcagaccatgcagcgcacccgacggctcgttacggtggcagctaccgaattcagccatacgcagcggcagatcgcggtaagatttcaacccctggttgaagatctgcacgtgacccgggcagttcataggcttaatgcagtattcacggttctcggaagaagtggtgaacatcgcatctttgtagttgtcccagtggccggttttttcccacagcacacggtccatcatgaacgggcctttgacttcctgatactgatactctttcagtttcgaacgaacgaaagtttccagttcacggaagatagtccagccgtcattgtgccagaacaccatacccggcgcttcttcctgcatatgatacaggtcaagctgtttcccgattttacggtggtcacgcttagcagcttcttcaagacgctgcaggtaggcgttcagcgcttttttatctgcccaggcggtgccgtagatacgctgcaacattttattgttgctgtcgccacgccagtacgcgccagcggttttcatcagtttgaagtgatggcagaaacgcatattcggtacgtgcgggccgcggcacatatcgatatattcttcgtgatgatacaagcctggcttgtcatcatggccgatgttttcgtcaagaatagaaactttataggtttcgccgcgcttcacgaaggtttcacgcgcttcgtgccagctgactttcttcttgatgacatcgtagtttttctcggcaagctcgtgcatacgtttttcgagcgcgtcgatgtcttcctgagtcagggtatggtccagatcgacatcatagtaaaaaccgttgtcgacaaccgggccaatggccattttagtgttcggccacagctgtttgatcgcatgacctaacaggtgagcgcaggagtgacgaatgatctccagaccgtcttcatcttttgcggtgataatagaaagcgtggaatcagtttcgatcgggtcgcaggcatccaccagctcaccgtttacacgtccggcgatggtggctttcgccaggcctggaccgatatccagagcgacatccatcgggctaactgcgtggtcgaaatggcgttggctgccatcaggaagcgtaattacaggcattttatgtccttatttgcagtggtgccccacacgaaagagcacatacaaaactaaataaattaactatatcatcaggttagatggctttatttgcttcactctgcaaactgtgtacatcaggatgtacaacttcctaaatgtacctaccttcgcctgctgataacgagcctcaatagtacacgcccttgataaattgtaaaagcgcggtaatggcattaactgcacacttttattgtggactttatatatgagtccttattacctcatttcaaccctcttccctcttctatactttcagtctgaccactggaggttgatatgtgcggacgcttttcccagtcaatgacccgtgaagattatctttcctgtcttgccgatgaagccgatcgagacatcgcatatgacccggagccgattggacgatacaacgtcgcgccaggaaccaaagttttgctactgagtgaacgcgtcgaacaactgcatatcgatccagttttctggggttacacccccggttggtgggataaaccacctctgattaacgcacgcgtcgaaacggcggccaccaacaggatgtttaagccgctatggtaacatggccgggcgatttgctttgctgatggatgcttcgaatggaagaaggatggtgacaagaagcagccctactttatccatctcgccgatggccagccgatattcatggcggcaatcggaagcacaccgtttgaacgtggagacgaagcagaaggctttcttattgtcaccgcggcagcagataaagggctggtagatattcacgaccgccggccgctggtactttcaccagaagcagccagggaatggatgagacaggatacaggagggaaagaagccagtgatataattatcgacggatccgtgtcagcggaccacttcatatggcatccagtatcacgtgccgtgggtaatgtgaaaaatcaggccccagaattgatagcccatgtcgattaaaaactcatattggacacgcatcctcttccatgctcgcgcgggataatgaacgtcactacaccgaaaacaacaacatcgttaagcgttccccctcaatggcttcaccatccttggtgataagcgatctccccattacctttgcaaagtcagtaataccatcataggtaatcatcacggtactgccctgcctgggcttcattgatacatcgactacaacgtatccagtagctgtttcaaccgttcgggggtttggcccggtaccgtaaacaagatcgacggttaacgttctcttgatgtaatcagtcgccggcgaaggaaaacccatcagattaccctccccatgttacgcatcagccagaggcggttttccccctcagacgttgacttgtacacgaagtagatctgatttctctctgtccaccgattagcctcttctcctgacaaatgaataccacggcttcgcagtcatggatgaagtcgcaagtatgcaggcatgagtaccctttcggattctgggtaatggagtccatgaaggcactccgtatgtctgattgtctaagcatgacaacctccgccttgacactgtataaatacacagtataactaaaagcgaaaacaaccacggagaaatagttatggcatctttaaatgacgataacctacgagacgacttatcctctactgaatctggtaaggggcatcattggttgcgctggaacaaggtggaaatgttcagcaaagtattaatattgtcatgcctgaatggtatggagctaagggaaacggcctcgatgacgatagtagtgcattcactcaggctgctaatactggcaagaatctgtatttgacgtctggaaaaaaatatattttaacatctccttgcgcattaccttttattgcaaactacgaggatggagagcgaaaaacggtttttggaaatggcgcaaagttaataacaaaaggcgcgtacagccctttcaaccaatatacagacgaaaaaaaatcatctttaagcgctattgtctatggatggaatttcttcgatttgaatattgaaggatttgccaataaagactcttcttacgacttggtcaatggcgcgcatggaatatcattcggattcggaaaggcctataatatcaaggggtttggattatgcaatgtaatcagagcatatggcaaaaccatagccaaacacgtttatggtgatgaattacgaaatgccttatattcgtgctacccctaccctaaaaacacatcaatcggaaataacaaactatttaatgcttgtgtaaattggtgttcaggtgatggtcttgtacttaagggtagtgatatatatgttgatggttttcattacaaatatgcgggatgtattacggcaagcaataatgatggagctaacgccactcgtggggtagctatatcagctggagcagatggtgtgccagcttcttctgtaaccattaataatatttccggagagttttatggggctggttcacttaacctaaacgcatcagatgtaacgatttctggtgggattaatttaggtagttactatactgaaaacttcaaagcagaattaagttcagctgctgtatggttgaacgtaacaaatgctatgatcggtgatatcaaatgtgaaaatatttttaccgggctaggtatcaacccgggatgttcagattttcacatcagttcattctctgcaaaaagtaagtataatgttagcaagcatccgtttttttcgattggtgactccgcagatagcaaaataaccaagggttatattgggaagttaaatctctttggtgagagcgcaataaataatgatgtatatataaacacctcgggagttattattgactccatccatatatctcaaatgaataaccaagaaggaggtgactctgtaaccattgcaaaagcggcaacaatcaataacatcacattaatctcaaccacgtccgccgctacaaataatacccttaactttttagctgcggccaaggttcaaaacatttatattgaaagagtatttggtacggccattactatttcaaatgatatagttccaaaacttgaccgtatatatctattcaataaacaaggggcaaaagctccaattatcatcaacggcaatggttccgcaagtcatcaatggggtatagtaacaataactggtccatcagtagcaagcccaaggatatccggttcacttattatggaggggtactcgggaaatgaatggaaacgcgctatagatacagtatcagcttctgtttcatatccacaaaaacaaatattcacactgacataagtatatgaatcaagatctaaaagttaaatatattgaacggtaacttaaaccttccccgataactcatgcatagagttatcgggtgggattaaagtagcctccctaccaaattcaactttatacctgtggaagtgtagtggcacagcaaatttggctacctgattaaaggtgacatcctcacctcaacacaaaacaggtgactcaatgaacaagaaaactaagcgtacttcccccctggttcagtctggaatgtgcacagctgattgttgataagggctactcctatcgacaagccagtgaagcgatgaatgtcggttctaccacgcttgagagctgggtacgccagctcaggcgagaacgccaggggattacgccctctaccacacctattactccagaccagcaacgtatccgcgagctggaaaagcaggttcgccgcctggaggaacagaatacgatattaaaaaggctaccgcgctcttgatgtccgactcactgaacggttcacgatagccgccagactgagtgacgccatacggttgtcagccttttttctgctctggaaatacaccgcagcagttacctgtactggctaaaacgacgcaatacggttaatccggcacgtgtcaggctgtacagcgaaatacgacgggcgtggaaccagagccggggctctgcgggggcgcgcactctggctgagatgctggtccaaaatggcgtccctatgagccgttaccgtgccgggcgtctgatgaaatgcctgaaccagggcagttgtcagcccggaaaacatcagtacaaaaatgctcgtcaggcgcatacatgcctgccgaacctgcttgagcgtcagttcgctgtgcccgaatcagaccgggtatggtgtggagattatccagcgctgcagttctttgcacgcacccggcacgtctccagcattcaatttcttcagtagcgtggaactggcgaaagcaccagagccaacgttataagtgaaggagtaaagcgcggcacgggtaggctcagggatgagaaccttaatcagcgggtcgatggcgttagcaacctttcgcagatctgacttcagcagtgtatcgcactctttgtctgagtagcggtgaccgcggcgagtatcggcgccagtgtgtccatcacaaacagtccagacgccgacgacatcctggtaagcgtaatagcggcgccctttcagtccatcagcgtcaccaggcattacagaagcgattgcgatggcgcaggaaccgctggcgattgcgccaatcatcttattcctgagcgtcgggttcatctctgctcctgcttcgtcggttgtcttcgcggattttgaaatacaaattcgtcaggtacgtaagtacggcaatgacaatgcccgccagcacgccgatggcattccactgctcggggctgtaggcattaagcatgccattcaggatgctcccggctgaagcgccataagcagcaccagtggttatcttttccatgcgatacatactctcaccttgcgtagttagcgggtgctgtatgtttgaaaggatcaggaccgtcgggttgatttatcaacaatgctcgtcgcagatgattcccgcggtcctgaaaataaaaaaggccacgcaaaagcgcagcctggttggagatggagtgtattattcagtgtaaggctgacatgaaaaacttatgacacccattttttcgctatacatggttagaggaacaggaaaactatccatttgaataaataacgcgtacttttcgccatgggtaacccgaccaaacatcagagtgtcttttccatttgaatcgtcaaatcgatcaacataacggaagactgcaccgctgatcgtcactatctgggatgtaccatttaccagtgcagagattttggtaccagcctttgtactgcattctaacctaactagtggattaacatcttgagtggggtccagatcagaactacccgtcgctgattgagccacgtatttccctttagcttccgatatacgctcatctaaagttttctgaacgcacccacttgcagaaagtacagcaaagaacacaaataaaactctaaaaatcacaaaaaatcaccaaatatgaaaacaaatatatattttttcatatttaattaatttcaaccagaaactataagagttatatcgtagatggcccttgcaacacggtattatagtttcattcagtacatctctacccaaaagccctgcccggatcgcaggcataaaaaagccccgcacgatggcgaggcttggtgttctgatagatcaaacgcaaatataggacaggatcgtctaccggggcggggtcagcccaattcccgcttaaaccgcgcggttaattaaccgatcaattacctgaaatgaagagataaatacctgcaccgctaaaaaacgaatgaacaaatcatccgttatagtgagaattcatatccggcaggaaataacaggaatcaggccggttgcccggcctgagaaattacattttataaccgagggacaaggtggtgcgtcggtcggtatgctccggcgccgaggccggcggctgggagttccacgtcaggttataggcgacacgtagcgcaaagtgggcgttgattgccacatttaatgcgctttccgagttcagcgtcgtgtcttcagccccgaataccgaaacaccttgagtaaatttggcgttatcggtcatctgccatgcccaggtgccggaggcgtaccccagaggctgagtttcgttatcgccatcggtgtattcgtcgtagcgcacgcccggaccgaattcgaaacgcaggctgtgaaccgggccgttgaggatctgacgaccataaccggcggtcaggacgtcgcgctgttgatagccgttgtagcgatcggtcagccagctggcctggccaaatacataattcatatcggtcaggttataacggctacggccgcccacggcatatttctccgaagagcgttgatcgttggaggaggtattgctcgcattcccccatagtgaccaggccgtggtatcgccgtaccaggtcaacgtggagtcagcggtcattgaggagcttttcgtgttgccggactgagcgagataacccgcattcacagcaccttcgaaaggttttttggcagtggaagggtcatccatgacggtaaaaacggaatcatcggccagtgcgtttacagacgcaaaaagccccccgccagcaatgccgctgcgggtactgtcttcaaaagcttcattataactctctaaaatacatatcttcaggacagtacaaatgatgaatggaccagggatcctttcattgaatttagagtccgtacaacatttaaggagaccaggcaggtcccggaaactttcgcgaggcgcgctgaatgcgagtcctaagaaaggcgcttgattataaaaaagcacgaataacttagcaatcagttgctatttcgttttttgaataagacggttcccaaaacaatctttatttcataaagataaaaaccgagacatctttgtaaatccaccgcccaccccgcttcccctcactccatttcagtgccatgcttaaaaaagcagctttattcgtattaaaggaggaacaggatgaccaaaatttatacgctcacgctggccccatcactcgacagcgcaacgctgacgccgcaaatttaccctgaaggcaagttacgctgtagcgcaccggtattcgaacccggaggcggcgggatcaacgtcgcccgggcgattacctttctgggcggtaaagcgacggcgattttcccggtaggtggcgccaccggcgagcatcttaccgccctgatggctgacgagcaggtcccggtcgaaacagtagaaacccgcgactggacgcggcagaacttacatgtgcatgtcgatgccagcggcgaacaatatcgctttgtcatgcccggcgcggcgctaaccgaagatgagttccgtcgcctggaagagaaagtgctcgcgattgagcccggttctctgctggttatcagcggcagtctgccgcccggaatcaacgtcgagcatctcactcaactggtaaaaaacgcgcagcaacacggactacgttgcatcatcgacagctccggcgatgcgctagccgccgcgctggatgtcggcaacatcgagctggtcaaacctaaccagaaagagcttagctcgctggtacagcgcgacctcagccagcctgacgacgtgcgtaatgccgcgctggagctcatccgctccggaaaagtacgccgggttgtggtttcgctgggccccagggggcgctgggagttgatgccaccggcagcgtacaggtggtgccgccaccgatgaaaagccagagcaccgttggcgcgggtgacagtatggtcggcgcgatgacgctacgtctggcggaacatgcctcgcttgaggatatggtccgctttggcgttgccgccggtagcgccgcgacgattaaccacggcacccgcctgtgttcattaaccaacacgcagaaaatctacgattacctgtgtggccgctagtctcgcccccttcactcgggtgaaggggtcaattcgctatcatggtctatgctagaaattccatgcataacaacagagtgaaaaatgagcaacgatattaccgcgcacgtgattaccgttaaattccaggaacaggcgctgaccgagattaacgagctcagcaatcatttcattcgcgcaggtttcgtcctgacgctcaacgatgatgatggcaaaacccatgatttaggcactaacacatttggcctgctgagcgcgcaaagcccgacgacgttcgggcattaagcgcaggtctcgcggaagccgctttaggcaggccggcagagatcgccatcaccacatttagcgaatggttaaaagctcaataagtgcgatcgccatcgtggaagacgtcagttgtgcgttagctcgaactttacggccaggttatacgctaaccttatgatatggtggaaaacatggggagagacagcatgtggcaagctattagcaatttgttaagcgagcagcacactgacggcgctgaaatcgaactgcgcaacgagctacccggcggagaaatccatgccgcctggcatttacgttttggcggaaaagattatttcgtcaaatgcgatgaacgcgaactgctccccatttttaccgcggaggcggaccagctggagctgctctcgcgctgtaaaaccgttaacgtaccgcaggtattcgccgtcggcagcgaccgggattacagttttctggtgatggaatatcttccgccacgcccgctggacgcgcataacgcgtttctgcttggtcagcaaatcgcccatttacatcagtggagcgaccagccgcagtttggccttgattttgacaacgatctgtcgacgacccgcagccgaatgcctggcagcgccgctggtcaacgttttttgctgaacaacgcattggctggcaactggagttagcggcggaaaaaggactgcacttcggcgatatcgacaacattgtcgatagcgtacagcagcggctcagcaaccatcagccgcagccttctttattacatggcgacttgtggtccgggaactgcgcgctagggcccaatgggccgtatattttcgatccggcatgttattggggcgatcgcgaatgcgatctggcaatgctgcctttgcatccggaacaaccgccgcagatttacgatggctatcagtcggtctcgccgctgcccgctggtttccttgaacggcaaccgatttaccagctatacactttacttaatcgggcaattctgttcggcggccagcacctggtcaccgcgcaaaaagcgctcgatgaagccctgcaataggggtaaaaaaaggccctcaaaggggcctttttcatcagcaaacttaatccatttttacgccgtttaagcggaatttgatgttcatcgtcaaacccgttcccggcctgcctgcctcgtagcgccatttgcgcatcgcggttttgacatcacgctcaaacatattggccggcttcgcagagagtatctggatgttctccacgcgaccatcggcggtgacatcaaatttcacgcgcacgtcaccttcaatacgtagcgcctgcgcacgttgcgggtaagacggatcgccgcgtttcaacgctttaggtccgctcggcgcggtggtcatcggttttgccgttgccgccgtcgtactcggggcagtacgcgcaggcgccgtattgttattctcaaacggcgagaccgggcgcggctcagcgggtttcacctcacgtttcggctcgacctttttctctggcttaggctttggtttcggcttgggtttgggcttcggttccggtttgtggataaccactggcgcctcttttggcggctcaggcaccacttcaggctccggttccggctccggttcaacaacgggttcaacgaccggctgcgccgcctgcggaggctctaaatccgccggcgccaccatcgtgatttcgattggctgtgaaggcgaaggcttttcaataacctgatgtaccgaggtataaagcaaccccgccacaacggcaccgtggatagccacggacagcagcgttggccacggaaagcggcgaggtaaatcaagggtcattgcgctcatagtcgtttctgttgaaaaatgatgccctgattttaaatgcaaatagcaatcatattcaataagacgtgttatcttgcatcaaattttgcctcgttttgtggaaaaaaaccggcgtgccgtggcatgctaaaggcgtgcgcatcttacattgctgctcataacgctttcacgtcacgtgatttgcctattttttgattaaggagccttgccgtgctttacgtcatctacgcagaagatatcgccgattctctggaaaaacgccaggcggtgcgccctgcccacctggcgcgcctacaactattacatgatgaaggccgtttactgaccgcaggccccatgcccgcggtagatagcaatgaacctggcgcggcaggatttagcggctcaacggttatcgcagaatttgaatcgctggaagcggcgcagtcctgggccaacgatgacccctatatcgccgctggcgtctatcagcacgtctccgtgaaaccttacaagaaagtattttagttaaacaaattagctatttaatatcagtaagatataccaatcataatatagcgatcattctgtaaaggacgcatttaggtacactaactgcagaatggtcgcccttccttggatcctcgatacgtcttctatactttcagtctgaccactggaggttgatatgtgcggacgcttctcccagtcaatgtcacgtgaagattatcattcctgtcttgccgatgaagccgatcgtgacatcgcatatgacccggagccgattggtcgatacaacgtcgcgcccggtaccaaagttttgcttctgagtgaacgcgatgaacaattgcatatcgatcctgtctactggggttatgcgccaggatggtgggataaaccacctctgattaacgcacgcgtcgaaacggcggccaccagcaggatgtttaagccgctatggcaacatgacctggcgatctgctttgctgatggttggttcgaatggaagaaagaaggcgacaagaagcagccctactttatccatcgtgccgatggccagccgatattcatggcagcaatcggaagcacaccatttgaacgcggagataaagcagaaggctttctgattgtcaccgcggctgcagataaagggctggtagatattcacgaccgccggctgcttgtactttcaccagaagcagccagggaatggatgagacaggatacaggagggaaagaagccgaagaaatagctgaggacggttccgtgtcagttgaccgttttacatggttccctgtttcccgggccgtgggtaacgttaaaaaccaggggccagaattaatcgaggctattgagcgcctataaattgataacgtccgaaatatgccagtagcagacattgctttccagcgttcattgtcctaaaagttaatgacccaatgtaatcaggacaatactatgctccttgagagacttaaacgtctcgaatgttctcttcatgataacaagcggaacgatcggaaatggcttgaacatatacttcatgaggaatttcgagagataacgcgatctggcatgttagttgatcgggcagaaacaatagaggcactttctactgaagttgatagaccaatcattcacagtgacgaatttagacttatcatcgttagaaataatttcgcaatattacattaccggacttttgatccagatggtagtaatgcctctcttcgttcttcatgctgggaaatgagtggaaatggccaatggcaaatggtattccatcagggaactcctgagtcaaggcgtgtctagctccaagttgcatcgtccgctcctcgctcgcagcggaccttcagcttgtataactattccgcttcgtgccaatgaccgacgttatttctttccaaagcgcagtagaacgattcttttatttaaatgatatagagtatgtacgctcacattggttgtcttaaccattcactttgcttgagggaaaaaatcagactcggcggtgcatctttcacatcataaatctcttttatatattgaaacccagttttttttagaaccttccgcgatgccaggtggttagctctcactacggcggatatctcggacagatttaacttacaaaatccatattggacagagtttttcgagaactctgtcgccagaccttttccccatgcctctgtggcgaaacgataccctaaattattaattactgtatccgcataactacggatacgcagcccccaaagccaatgattttttccgggctatccttcaaagagattgcccagtttccaaaaccgtgggtttcccagtggttaatccagtgagctaaaacagtttgagcatgttgtatgtcaggatagggccctgccgggttaaaggtgttcgtagccggatcaccataaattctgaaaaggtcatcaaggtcaaatttcgttacggggcgaagatatagtcgggtagattgaagttgcaaaacaatttccttactaaagagctcatcagaatagttagataactgtatatatagtgaatcacctgacttcgagcgaatcactgtatctaagcttttattccggcacgcttcatcagtcgccagacccggttcactccgcactgctgtccggtatcacgcacttgcgattgacctgcccccaggattagatacaaccttcagttagtaatgtcggttggtgacccgctccccatatgtgatccatgcataatcaggaataaccggcttcatgttggctgcatattctgccaaccggcagacttctcagcgaattaggatggtgtcatcctccagcccagtgcagaatggggacgcctctggttatagtgtatgcgccaggcctcgattttgcactgtgcatcctccagagaaatgaaccagttctcgttcatacacccacttgcccagcattttccctgcaaattcagagccgttatcggttttcagcaactgtggtaagggacgtctgagcgcaatggtgttcagcatctctgcgacctccgttgagcgcagattctggcccacgcagatccccagacattcgcgtgtgtagagatcaatgatctgtcagcagacgtaaccgaagcccgtcaaataaggcatcagagacaaagtccatgccccagacatgattcggatacagcccctgaggctggggctgtcggcgctgtgccgatttattccggcgtgggcgtttgagacgcagggacagcccctgcttgctgtagagtcagcaaatgcgtttatgattatcccgcaagtcctcccgcctgagcatgacgtgaacccttcggtagccatagtgaacccgggtttcggtgatctccctgatacggaggcgcaacgcactgtcgtctgctgctacagaacggtagcggaaagagctgcggctgacccgtagcgcaaaacagacctgcctctcactggctccgtagagtgcctgcaggtcccggacccattcgcgcagacgcgccagcgtcagttcttttttgccagcacatcctgcagcatagccttgtcgaggctcagatcggcaaccagcttcttcaacctgagattctcttcctcaagctgccgcatgtgtttcagctccgaaggagaaatcccgccctatttcttgcgccatgtatggagcgtggcatcggcaatgcccagcttacggcagacctccggcacggacgtccccagttcagcctgcttcagggcaaaaacaatctgttcttcggtgaatcgtgactttttcatcggcaccacctccgttcagggagtgtagatcatgccggcattctgtttctgaatggagcaggatttcgggtcagggtcacagccgcagtgttcatgcaacccttcgtaccggtattgatcaacaggtggccaattccgggtttgtttcctattttttaaaccagaaccctttctttaaggcaatgaggtcatgctgaacacgtggatcatcctgattgtggccatcgcggccgaaacctttgcaacaaccatggtcagagcatcagaaggattcacacgcctgcttccttcccttggggtcgtcgccggttatgccgtgtcattttacggactctctcaggtcgttaaggtcatgaatctggggatcgcttacgccatatgggccggcctgggcatctttcttgtctcaattttttcctggtttctcttcggccagaagcttgatcttcctgccattgcagggatgggcttgatactgtcggggtggtggtcattcagctgttttcctccaccgtcacgcactgatattacctgcaggtactggatatgccgaaacgtatacagattgcagaaaaaaactatcttcctgccctcattatctggcccgtcatttatcttattctggcatttatctctctgaaactggacgatccgcaaaatcgtgtagccatggtctggtttcctgccggggcagctgtcagcgctttcctttctctgccgcgacgattctggcccgcaatgtatatcgtgctctttgctgcccgcgcagggatggatgtgctgatgcgccattcttcggaaacatccctgatactttccctgatctcagtcagtggtgacgttacagtggcgctggccgtacagcactacagtcgtggacaggatgattttcgtaaggtgtgtgtctggctaatcagtaccctgatcatcagcgcgctggcgggtatggcagcagcaggatggctgtcttcgcgtcatcccgtgtcttttgcggataccattgctttgtggtgggcggcaaatgtcagcggcaacattgtcgccactaccgtactgacaggtctgacatgggagccagcccgtaaggcaacgggggacatcgtaaagaccctcgctggcgtgctgctagtcgcggtggttgccatactcattttctcttccccttccggggaagagtcccgggcggggctcatttacggactggcctgcttgccggtcctgttgactgctgtcgtcccggtcatcgccggtgcccaggccggcgcgctggcttttctggtactgagcatcgttgtggtttccttttcatggcaccagacaggccccttttttattaaaggcctggatccgggcgaaccgctgcttctcgctcagggatacctgtccggtacggccatcctgactatctttgtccggctgttactgcggttgccggataagctaaacggtccggggcgtaagcagatgcatcacgaagaaaccgcctttcgcatggatatccgaagtggccggatcgactgggatctgcagggaacaccggtgctgacagacacggtggcacacctgcctgacagaaaaatcctgctccagagcgtggatactgctgtcaggcaacagttaacatcacgctgggaacaggcaatccgcggcctgcccgtaggcggatcgttgatattccggcttacattgccgggagatgagcacgtgatgatctgcgagcggggactgttctttttgcccggtacaacaggtggattcctcgtcggatactggttacccgccagtggtccggtttccgttatccgtccggaggaccactgaatatgctgcagattgcactgcttttatgcggccgacgttttatcggtggcaaccggtaccttcttactgctgcaggtctgatgtggggtcttttcggttttctggtactggcggacggtatgctgggagcacgctattttccgctcggactttttggctggtttcttttgtgcgagagtctgttaacgcttgttgcgtcatccggtgccaccgggctaagcgaggaatttatctgtttaaaggtgggattattggagccgtggccctgcttattctgtcaggatactcaggcagtaatctcctcctggctatcatactgggatttatctgtttgttgtccggcgcttttcagattgctgccgcctgggtggtacgttatccgtactggagacgcgcgctggctggcgggatgtgtcagatcctgtatgcggtattccttttccagccctatcccactcatcatgatggaacggttcctcagttcatcggggcgctgatgctgctcagtgccgttgactgcattctgcttgcttttcggctccgaagtctggcccgggggtgactatttttgatgtccagtctccggacagcacaggatacgcgccgacaaatacagagccacagcatccctgtcaggaagaagtggcgttagaagcgacagagctccgtgttctggtctggacaccggaaggttctgctatccaggacactctcccccggccagtgatgaatcgctatattgcagcagtggattctgccggggtcatttctaccggacatgccgcgctggagatgcaggatatctatatcagtctttacccggcagtggatatagatcggtccccttctgagttttttcgcacactccgggccgtacgggagaataatgtgcccggaaaatttcaggacagttacgcatcagagtccgccgcctggtgtgaagccgacagacaggtttgttttcatactttcaacgcggtatcgctccgggcattcactacatactatcgccgccaggaaatatataaccttacctggcgaaattgctccagcagtgtggcatacgcccttgaagccgcgttagatggtgtgctgtgcaaccggagcggctggtcagtttttttacggctcttcttgcagccggagctctggatcgcagcacaactccgccgccgtgccaccaccatggcctggacacccgggctggttctggattattcccgcgcattgcacgggctggttcacccggtccgactgaactggtttcgcaaaccatgagatgcgacggcgtcaggaaaaggtgctccttccggacggtacaagaaacatcgccggctcctgactccgccctccttctgatgaaccctgacagaaaccggtatacctcagggctgtcgggtcgtgccggcaaggggtgtcctgtcaggatgctcgtttctgccatcgcaacagacggtactgttaccccagcattgttcatacggaaaaccgatcagggcttccatgacggcacgaacatccgctgtgacatgtgaaatctggccaccaccccggatacgtgccacctcagcaagcaccaccagatgtgccttccggttcagtttcatctgcgcgctgaaataaatccccgcgagagccagtgcaatcacaccgacgcaaaagaccatcgcaatagccattaccgcactttccggctgggtttgcgatttagactgaaagccatagaaactcaggatcgctcccatagtaaacacaatcacagagcgcacaagtttaccggagaaggtaatcgtgccggcatagatcccctcgcggcggcgtccggtaaaaacttcgtcaacatcagcgagaaaggtatacacggtccagggaatgtaatacaccccgcccgtcccgatcccgaaaacaacggtaatcgccagcatcgccgcagtggcatactgttgaggtaggtggaaaaaatagagcgcggcataacacagtacggaaaagataacgatacccagcgcaagtatatagggcttgctgaacccatgttttacgcagatagcaataaaaatagcagtggaaatgagctgaagcacggagttcaggctgctcagtccggataccatggtcggatcatactgcaggacaaaaatgatatagtaggtaaagacagaagcaaacagccactcggccccgaagccgcacaaatacatacccagatgtttgcgaaagacatgcagtgaaaaagttgatctcatctccctcagcaatgccagcattgcgtggctgagtgtagtgttttcttcactttccggcgaagcatctgcggccggggccagaaataaaatccactcggatggacatccagaaccctacagagcaaacgaacaggccagcaacggctgttgtcgcggataaaggcgtacctcagtcggacagcgttgcgaagtacgccgcggcttttttaatatgtcccgttagtccgtaacccgcttcaactctttctgaagacggcggatcccggcctgagcatctgactgttcattatgagtggaagaatccggaccgtacttctttatccaggcgtaaagactgtgagtggtgatatcgagacgtgttgcaacactggaaacagaacgaccacgatcaacaacctgtttgactgcttcaattttaaactcttcagaataacgcttaccgctcatgggcacctctctttaagtcatcttcaatgactctgaggtgtctgttaaacccgcggcgattcacggtgcctttaatttttactctcagaattcagagaaggtgaacagcaaagcatgacgctgccgtttgaccaggcacttcctgattgaaagaatccgcatgttgcggcgagattgagcttccagccagcgcgatttacggcgacttacttgtctaagcatgcgccagcgccctacttccgttctactacgcttcattgctactactctacgagtgaaaaacattcctcattataaaccgatgaatctgtctgaccatcgctttcgctgcgtttttatttgccagatggatgctgatgcgtaaactcatggcatcgggctattcaaaaggatttttcatctatgacaaccttttacacggtcgtaaactggctggtcattcttggttactggctgttgattgccggcgtgacattacgcattctaatgaaacgccgtgcagtgccttccgccatggcgtggttactgattatttacatcctgccgctggtgggaattatcgcctatctttcctttggagaattgcatcttggcaaacggcgcgccgaacgtgcgcgcgccatgtggccctccaccgccaaatggctaacggacctgaaaagctgcaagcatatctttgctgaagaaaatagcccggttgccgaatcgctgttcaaactctgcgaacgtcgccaggggatcgccggcgttaagggtaaccaactgcagttgctaaccgaatccgatgacgtgatgcaggcgctgattcgcgatattcagctctcacgacacaatattgagatggtgttctatatctggcagcccggcggaatggccgatcaggtggcggaatcgctgatggccgccgcgcgccgcggcgtgcattgtcggctaatgctcgattcagccgggagcgtagccttcttccgcagcccgtgggcggcaatgatgcgtaacgccggtatcgaggtggttgaagcgcttaaagttaacctgatgcgtgtattcttacgtcgtatggatctgcgtcagcaccgtaaaatggtgatgattgacaactatatcgcctacaccggcagcatgaatatggttgatccgcgctacttcaaacaggattccggcgtcggtcagtgggtcgatctgatggcgcgaatggaaggcccggtagccacggcaatggggatcgtctactcctgcgactgggaaattgaaaccggcaagcgaattttgcccccgccgccggacgtcaacattatgccctttgaagaagctaacgggcataccatccataccattgcttctggtcccggcttcccggaagatttgattcatcaggcgttgttaaccgcagcctatgcggcgaaagaacatctgatcatgaccacccctacttcgtccccagtgatgacctgctgcacgccatctgtactgcagcccagcgcggcgtcgaggtcagtattattatgccgcgcaaaaacgactccctgctggtaggctgggccagccgcgccttcttcacagaactgcttgccgctggcgtgaaaatttatcaattcgaaggcggcctgctacataccaaaagcgtgctggtggatggcgaactgagcctggtcggtaccgttaatcttgatatgcgcagcctgtggctcaatttcgagatcacgctggcgatcgacgatgtgggcttcggcggcgatctggcggcggttcaggacgattacatctcccgctcgcgcctgctggatgcaaaattgtgggccaaacgaccgctatggcagcggatcgcagagcgactgttttacttctttagcccattgctgtaaaacgtgcccatcagatgcttaacgggtagcaatcatggatatggatttaaacaatcgcctgaccgaagacgaaacgctcgaacaggcctacgatatctttcttgagctggcggccgataacctcgacccggcagatatcattcttttcaatctgcagtttgaagagcgcggcggcgccgaactgtttgacccggcggaagactggcaagagcatgtcgattacgacctcaatccagatttcttcgccgaagtcgttattggcctggcagacaccgatggcggcgagatcaacgatattttcgctcgcgttctgctatgccgggaaaaagatcacaagctgtgccacattctgtggcgcgaataagcattaagctaatgcgcctgtagaaaagcctgccgacggtaacatcggcaggctttttttatgcgttattgcggtaatttagttccgcaggcgtgacagaaacgggcatttttatcatgctcgtcgttattgcagtttgggcaaacgcggcgggcgcgtcggttttgcagcgccagcgccgtagtcatatgagtcgtaatcagcccggttggaatggcgatgatagaataaccgatgagaataagcaccgaggcgaggatcctgcctaacggcgtatgcggcgttatatcgccgtatcccacggtagtaatagtgacgattgcccaatagaccgaggcatttaaggtggtaaacccgtattgcggcccttcaattaaatacatcagcgagccaaaaatcaccatcacaatagcaataaacgagtaaaacaaaatgagctggtgacgggcgctgacgatggcccgccaaaaaatattcagcgacggcataaagcgcagcagcttaagaatacgcagcgcgcggataacccgcatggcccgccaggcgaagacatactcaaggctcatttccggccatagccacatcacatatagcggcagaacggtcgccaaatcgataaatccccagaagctgaagatatagcgcagcggattcggccagcttattacgcgtagaatatattccgcggtgaagaccgcggtaatccctaattccagccagacaaaaacatgccatccatcaagcgacaggtgatactgcgagccgagtccggactcaacaaaaataataaccacgctcaacagggcgaataaaccgcaaagcccttcaaaacgacgaccggagcgacgagtttgatcgaagagtagatggtaaagccgcaaacgggcggcggaaagcgaaactgccacgttaacctcacaataaaaaagggctgacatcagtcagcccgagtgattataacgggtctaccttcaggcaggaaaccgcatggcggaaactgccctccagcaccgggcgcgttttagcgcattcgggcccggccaagggacatcgggtgcggaatacgcaacccgaaggcggattaatcggcgaaggcaactccccttccagcagttggatggttttgttcttctccagatcaggatccggcaccggcaccgccgacatcagcgctttggtataagggtgcagcggattatggtacacctcatcataggtccccaactccaccgcgtggcctaaatacatcaccagcacacggtcggaaatatgttttactaccgccagatcatgggcgataaaaatcaatgatagccccatctcccgttgcagttgctgtagtaagttcaccacctgcgcctgaatggaaacgtccagcgccgaaaccggctcatcgcaaataatcaacttaggctcaaggatcagcgcgcgcgcgataccaatgcgctgacactggccgccggagaattcgtgcggatagcggttaatcaagttcggcagcagtccgaccttcatcatcatcgccttcacgcgatcgcgcacttcctgacgaggcatcttcgggtgataggtccgcagcggttcagcgataatttcgccaatggtcatacgcggattcagtgaggccagcggatcctggaagatcatctggatatcgctgcgcacatcgcgccactcttccggtttcatgcccagcaggtttttacccagccaggcgactttaccgtcggtggctttcaccagaccaataatggcgcgggcgaaggtcgatttaccgcagccggattcgccgaccacgcccagcgtttcgccttcatacaggcgcagagtgaccccatcaaccgctttgagcgtttttgacggctgccagaaccattgcttgccatctttgatatcaaaatgcactttcagatcggcaatttcgagcagcacttttctttgttcgatcacggcgttcatagcagatcccctaccggtttaaagcaagcgcgcagacggcctggcgcaaacgactccagaggcggagcgctattacagatttccatggcatgcgggcagcgcggctggaacggacaccctttcggcagacgcagcaggttcggcgggttacctggaatcgttagcaaggaatcgccttcgccatcgagacgcggtaccgcattgagtaaaccgatcgagtacgggtgcgacggttgatagaagacatctcgcgcctgaccgtattccatagtgcgcccggcgtacatcaccagcaccttatcgcagatccccgcgaccacgccgaggtcgtgggtaatcataataatcgcggtgttaaattcgcgcttcagctcgttgagcagggtcatgatctgcgcctgcacggtgacgtccaacgcggtagttggttcatcggcaatcagcagttttggccgacataacagcgccatggcgatcatcacgcgttggcgcatcccgccggagaactcgtgcgggaacatcttcatgcgcttgcgtgcttccggcatcttcaccgcatcgagcattcttaccgactcttcaaaagccgcggctttgctcagccctttatgcagcatcagaacttccatcagctgctcgccgacccgcatataagggttcaacgacgtcatcgggtcctggaaaatcatcgaaatctgttcggcacgcagcttattcagatcgcgctcgggcaaattaaggatttcgcgaccgttaaaagtggcggaaccgctaatatggccattcgcggccaaaagccccattagcgcgaacgccgtttgcgatttaccggaacctgactcaccgacgatgcctaaggtttcgccggccctcaggttaaaattcagatcgttaaccgcggtgacatcgccgtctggcgttttaaacgtcacccgaagatccttcacatccagcagcagaccgctttgctgcgcggcctgcggcgctttagtcatttcaattgtgctcatgacggcgctccttagcggtctttcgggtcgagggcatcacgcaggccatcgccgataaagttaaaacaaaacagcgttaccaccaggaacccggcagggaacaacaacagccacggcgatacctccattgagttggcgccatcactgagtaatgcgccccaactgctcagcggttcctgggtcccaaggccgaggaagctcaggaaggattcgaacagaatcatgctaggtaccaacagtgaagcgtaaaccacaactacacccaggacgttcggcacgatatgacgaataacgatattcgcggtagagacaccgccgacctgcgcggcttcaatgaactctttacgtttcaggctcagggtctgaccgcgtacgatacgcgccatatccagccacgacaccataccgatcgccacaaagatcaacagaatgttctgaccaaagaaggtaaccagcaggatcacgaagaacatgaacgggaaggagttgaggatttccagtaaacgcatcatcaccgagtccactttgccgccgagatagccggaaagcgaaccatagagggtaccgaggatcaccgccaccagtgccgcggcaacgccaaccatcagcgatatgcgcccgccaatcgccacgcgcaccagcaggtcgcgaccggatgaatcggtgccaaaatagtgaccagactccatatccggagcgttggacatcatcccccagtcggtatcgaaataggagaactgcgacagcattggagcgatagtcacaaacagtgcaataatcaccagcacaatcaggctggccaccgccgcgcggttatgcataaagcgacgacgcgcatcctgccacaggctacggccctcaacttccagcttctcactgaagtgctccagcgcctcgctgtttttcttacttaacatcatggcgaactccggcttcagtagcgaattttcggatcgataacggcgtacagtacgtcgacgatcgcgttaaacagaatggtcagcgcgccgaccagaatcgtcaggctgagcaccagcgagtagtcgcggttaagtgccccgttgacgaataactggccaatacccggcaggccgtaaatcgtttcgataaccattgagccggtgataatgccgacgaatgccggccccatataggaaagcaccggcagcaacgcaggcttcagcgcgtggcggaagataattctgcgcatcggcagacctttcgcccgtgcggtacggatgaagttggagtgcaaaacttcaatcatcgatccacgggtgatacgggcgatactggcaatatatgccagcgataacgccaccatcggcaggatcataaatttcagcgccccgccgttccaaccgccgccaggcagccaatgcaacgtgatggcgaaaatcatcaccaatagcggcgccaccacaaaacttggtatgacgacgccggtcattgccacccccatcaccgcgtagtcccatttggtattttgttttaacgcggcaataaccccggcgctgacgcccaggattaccgctaataaaaaggcggcaaggcctaatttggcggaaaccgggaagcttgatgcgaccagatcgttcaccgaataatctttatatttaaaggaaggaccaaaatcaccgtgcgccagttgcttcagataattgaagtactgggtcatgatggggtcgtttaaatgatatttcgcttcaatgttcgccatgacttccggcggcagcgtacgttcaccggtaaaaggactgcccggcgcgaggcgcatcatgaagaaagagatagtaataaggatgaatagcgtcggaatcgcttccagacagcgacgtaatatgaattttaacattgcccgtaccttctggcctgtgcctatcgagtgcgatgaattcagacacggtggggcaagctaagccagccccacgtcttgccattaatgtttgataatataaaggttcttcacgtaaatattatccaacgggtctttaccggtataaccgccaacccacggtttaaccagtcgtgcgtttacatagtagtaaacaggaacaatcgcggaatctttatccaactgttgttccgactgcgcgtacagatctgcgcgtttcgcttcatcggtgacctgcagagtatcgccgatgatcttatcaaatgccgggctcttataatgcgccgtgttgttagaactatcgctgagcatggtgttcaggaacgatgtcggctcattgtaatcagcgcaccagccagcgcgcgcgacgtcaaaggtgccctgatgacggctgtcgaggaaggttttccactcctgattttccagcttaacgttagcgccgaggtttttcttccagatggacgccacggcaatagccagttttttatgtaagtcggaagtgttatagagcaggttaaaggtcagcggcttatcagcggtataacctgcttccgccagtaattttttcgcttcttcattacgcttttcctgagaccatttgaaccactcaggttcaacgagtttcatgccgtcggtgtatggcggggtgtaactgtaagcaggcagatcgccctggtttttcactttattgacgataatatcgcgatccagcgccagcttaagcgcggtacggacgcgtacgtcggtaaatggggctttctggttattgatttcgtaataataagtgcacagataaggatcgacgtgaacttctttcggtatctcttttttcagcttctggaacagttcaatcggcatgttgttataggtcatgtcgatttcgccgctgcggtagcggttcacgtcggtaacttcagaagaaattggcaggtaagttacctgattaataacggttttagcgttgtcccagtaattcgtattacgctcaagcacaatacgttcgttcactacccagtcttttaatttataggcgccattggtgacgatattcgccggctgagtccatttctcgccatatttttcgatggcggcttttggtacaggagaaacggatggatggacgaggagtttatagaaataagggactggctcgctcagagtgacttcaaacgttttgtcgtcgatcgctttgacgccgagatcggttgcgggttttttgccggcaataatctcatcgacgttggcgacatggccatactggagatagctggcgtacggtgatgctgttttcgggtcggccagacgctgccagctataaacgaaatcttgcgcggtaaccggcgaaccatcagaccatttggcatctttgcgaatatggaaagtccagactttaaaatctttgttatcccacgattcggcaacgcccggaacaggatggccgttaagatcgccaatcactaacccttcaaacagatcgcggttaacgttggactcaggtacaccttcaattttatgcggatccagagattgcacctctgccccgttattacgcaccagcgtttgtttatccgccagttgcaccccggcaggaacatccgctgccatagcaacatttgcggtgatgagcgcagataaaattcccgccgctaccagactttttttagtgatgatggtcatgtgttgttactccactcattataattactggttatttaaccagcctgttatttttcccttatagggattctgtacagtgcaggagtctttgcagctgtcagattttactgcttgctatcaccgacttatttattacgaccgctcaaacggcagccttgacgtcgattctttaccccctgtccagaggggaatgtcggcacaacgagtcatttaataataattctcatttgtgcatattatttagttagcgatcaggccggaaagtaccaaaacgatttcttgtccgccaatgcaatttgcaaatatgttaccgaattctcttttattgttttttttagcgccattaccgccagcctcgctcggtttaaaacaaaaaaatattgatattagtcagccacataggaacaccctgtcattttgcgttccgacgctgcgcgcgaagttggttttttgtacaaaaatttaacaattgtctattttttagcacattaatctactgtctcaatgaaattactaatatcatttcgatgatccgacagcaagcgccagagaatggtgtgatgaaaataacagtgatgatgggtgaaagacagtacgacgagatagaataaaatcaaataagtatatgataaatatagaattaaagcattattcgcaaaagttatagtttgtcatttatctcagcggcaggaataacttttgctaataatctttcaaacgcgaggcccagccccacgcctgatacactggctatgctgtcaatccaggaaacaacgctttaattccggtaacaataaactcgatgcctaaagccatcagtaacagacccatgatacgtgtaatgacgttaataccggtctgccccagcaatctgactaaccatggcgccatgcggaaaattccccaacaacaggcggcaaacaacgcaatagcgattgaaaaaccaatcagatgggcaatcgagtgataacgcgtgccccacacgatcgtggaactaattgcccccggccccgccattaaaggtaatgccagcggtacgacaccgatgctttcacgaatggccgtctccgacttctcttgtttgttttgtttatcttcgccgagtttgccgctgatcatcgacatggcgatcgtcaccaccaggatcccgccggcaatacggaaggaatcaattgagatgccgaaaatttgtaagatgccatcgccaagaaagagcgaggtaagcaggatgatacccaccgacaggttagccgtcagattcgtcttattacgtaccagcgccgtctggtaactggtcatgctaatgaaaaccggaatgatgccaaccggattgaccagcgcgaacaggccgataaaaaatttaaaataaatagcgaaatcaaacaacggtagggtcacagtgaactccgcagcaccattaaaaaaggctgttgacagtatcggtacaaaataattgcgcagaagatacccttttcatagccataattcatctcaaatatgcacccgggtttattgattttatttgttatatatttgtttcgcgcatgcactttattcattaaatatgcatatcttatcattaaccttgacttgactggttaattattaacctgctgaaaggtatcagcatcgccaaatattgatccaaatcacgtaattaatactcagaagtgagtaatcttggctacatcaacagagtgaaaggccgaagtacctgagtgcgtagcgagacaaagcttttttagtaaatcagtgggttcaaagcgttagaaatctttacgttaacatttacatgcaagctgttaacagcctgtctataatgtcgaatcgagctactgttttactaaaaaagtttaacattatcaggagagcattatggctgttactaatgtcgctgaacttaacgcacttgtagagcgcgtaaaaaaagcccagcgtgaatatgccagtttcactcaagaacaagttgataagatcttccgtgccgccgctctggccgctgcagatgctcgaatccctctcgctaaaatggctgttgccgaatccggcatgggtattattgaagataaagtgatcaaaaaccacttcgcttccgaatatatctacaacgcctataaagatgaaaagacctgtggcgtcctgtctgaagacgacactttcggtaccatcaccattgctgagccaatcggtattatttgcggtatcgtcccgactaccaacccaacttctactgctatcttcaaatcgctgatcagcctgaagacgcgtaacgccatcatcttctctccgcacccgcgtgctaaagacgcgactaacaaagcggcggacatcgtattgcaggcggctattgccgcaggcgcgccgaaagatctgatcggttggatcgaccagccttccgtagaactgtctaacgcactgatgcatcatcctgacatcaacctgatcctcgccaccggtggcccaggtatggttaaggccgcttatagctccggtaaacctgctatcggcgttggcgcgggcaacacgccggttgttattgatgaaacggctgatatcaaacgcgctgtggcgtccgtactgatgtcgaaaaccttcgataacggcgttatctgtgcttctgaacaatccgtggtggttgtcgactccgtgtacgatgccgttcgcgaacgttttgccagccacggcggctacctgctgcagggtaaagagctgaaagccgttcaggacatcatcctgaaaaatggcgcgctgaatgcggcgatcgttggtcaaccagcagcgaaaatcgccgaactggcaggcttcatcgtgccagccaccactaagattctgatcggcgaagttaccgacgttgacgaaagcgaaccgttcgctcacgaaaaactgtctccgacgctggcaatgtaccgtgcgaaagatttcgaagacgcggtcgataaagcagaaaaactggtcgccatgggcggtatcggtcacacctcttgcctgtacaccgaccaggacaaccaaccggctcgcgtggcctacttcggccagatgatgaaaaccgcgcgtatcctgatcaacaccccggcttcccagggtggtatcggcgacctgtataacttcaaactcgcaccttccctgactctgggttgtggttcctggggtggtaactccatctctgaaaacgttggtccgaaacacctgatcaacaagaaaaccgttgctaagcgagctgaaaacatgttgtggcataaacttccgaaatctatctacttccgtcgtggctcactgccaatcgcactggatgaagtgattactgatggtcacaaacgcgcgctgattgtgactgaccgcttcctgttcaacaacggttacgcggaccagatcacttccgtactgaaagcggctggcgtggaaaccgaagtgttctttgaagttgaagctgacccaacgctgactatcgtgcgtaaaggcgcagatctggccaactccttcaaaccagacgtaatcatcgccctgggcggcggttccccgatggatgcggcaaaaatcatgtgggtcatgtacgaacacccggaaacccacttcgaagaactggcgctgcgctttatggatatccgtaaacgtatctacaagttcccgaaaatgggcgtcaaagccaagatggttgccattaccaccacttccggtaccggctctgaagtgactccgttcgccgtggtaaccgacgatgcaactggacagaaatatccgctggccgactacgcgctgactccggatatggcgattgtcgatgccaacctggtcatggatatgccgaagtctctctgtgccttcggtggtctggatgccgttactcacgctctggaagcctacgtctccgtactggcctctgagttctccgatggtcaggctctgcaggcgctgaaactgctgaaagagtatctgccggcctcttaccatgaaggttctaagaacccggttgcccgcgaacgtgtgcacagtgccgccacaatcgctggtatcgcgtttgctaacgccttcctcggcgtgtgccactcaatggcgcacaaactgggctcgcagttccacattcctcacggtctggcgaacgccctgctgatctgcaacgttattcgctacaacgcgaatgacaacccgaccaagcagaccgcattcagccagtatgaccgtccgcaggcacgccgtcgctacgccgagatcgcagaccacctgggtctgagcgctccgggcgaccgcacagcggcgaaaatcgagaaactgctggcatggctggaaagcctcaaagctgaattgggtattccgaaatctatccgcgaagctggtgttcaggaagctgatttcctcgctcatgttgataagctttctgaagacgccttcgatgaccagtgcaccggtgcgaacccgcgctacccactgatcgccgagctgaaacagattcttctggatacctactacggtcgcgattttgtagaaggcgaagcggcggctgtaaaaaaagaagctgctccagccaaagctgagaaaaaagcgaaaaaatccgcttaattcgcagaattgaaatgaacgaaaccccatctattgatggggctttttttatattcgtactttattagagttcgtatccaggagtagtggatggaatgaaactgatgagaccggaataaaggaaccgattccataaaagacaacaggcgccatttaggcgcctgaaggtaatgatattaaagcattattcgcagtggcgcagctgactttgcacctgagttaatgaaccggttctcaaggcctctttataatgcttacgacatacggaaacgtaccgctcattcccgccaatcactacctgttcgccttcattgtatggccgcccttcctgatcaagacgtaacaccatgcttgccttacggccacagaagcaaatagtttttaactcaaccagtttatccgaccatgctaacaaatattggctaccgctaaataactcgccgcggaagtccgtacgcaagccgtagcacaatacagggatatccaactcatccacgacttcagagagctcatggacctgttcacgggtcaggaactggctttcatccaccagcacgcaatggattggctggcgggcgtgctctgtcgctatatcggcatataacgacgtctgtggattatacagacgcgccggtgaggacagaccgattcgcgagcttactttgccagacccaaaacgatcgtcaatttcagcggtataaacgacggtacgcatccctcgttcctggtaattgtacgaggactgcaacagcgcagtagacttacctgcattcattgcagaatagtaaaaataaagttgtgccatcggctgcgtaaccccaatcaatgtgttttactgcgcaattgtaccatatattaccgaaccgaccgtgctttcacaggggtattgctggcgggcttaaccataatgctttacaaaaaatgaaacggtttgcgaatgaatagccgcaggtaacaccggtgccacacaaacagatacaaatcattgtcgtttcgtgcttaaaccgccattctccagacaactataatgggtttagaccgccaatttatattaaacatcaccataactaatgcgcttaaactgaagggcgatatttatccagatgaagtataaatttactctcgaaacgcaggaaaatcatcctgactcatggttttagctcctgcaggtatgcttaagctataagcgcgaagatgtgaagccgcgcgaaaatttaacttaaattatttaatcgaccagacaaataacaagtaattttgaattccttacattccccctattgcacatctgattttatcgctctattattagttcaacaaaccaccccacaatataagtttgagattactacaatgagcgaagcacttaaaattttgaacaacatccgtactcttcgtgcgcaggcaagagaatgcacccttgaaacgcttgaagagatgctggaaaaattagaagttgtcgttaacgaacgtcgcgaagaagaaagcgccgctgctgctgaaattgaagagcgcactcgtaaactgcaacagtaccgcgaaatgctgatcgctgacggtattgatccgaatgaactgctgagcaccatggcagcagttaaagcaggcacaaaaactaaacgtgctgcacgtccggctaaatacagctacgttgatgaaaacggcgaaactaaaacctggactggtcagggtcgtactccggcagtcatcaagaaagcaatggacgagcaaggtaaaacactggacgatttcctgctctaattcgctttacgcttgatataaaaatcccgcttcggcgggattttttttatcgctatacgctgaaagtatcaggcataaaaaaccggaccactatcaggcgatccggttgttctggcggcgaatattacttcgcgacagcttgcttaagccaggctttaaagtcttcacccagagctttatggcgaacgccatattctacgaaggcctgcatataacccagcttattaccgcagtcatggcttttgcctttcatgtggtaggcttcaaccgtttctttctcgataagcatatcaatagcgtcggtgagctgaatttcatcgccagctcccggaggcgttttcgccagcagcggccaaatatcggcgctcagtacataacggccgacaaccgccagattagacggggcgacatctgctttaggtttctcaacaacccccaccatcggcacgctttcgccaggctgcaggctctcacctttgcagtcaacaacaccataggccgtgacgtcctcaaccggctcaaccatgatctggctggcgcccgtttcgtcaaagcgagcgatcatttccgccaggttatcacgggtcagatcggactcatattcgtccagaatcacgtccggcagaataaccgcaaccggctcatcgccaacaacgggatgcgcacacaacaccgcgtggcccaagccttttgccaacccctgacggacctgcatgatggttacgtgcggcggacagatagattgaacttcttccagaagctgacgttttacacgtttttccagcattgcttcgagttcgaaactggtatcgaaatggttttcaatagagtttttcgaagagtgtgtcaccagaacaatttcagtaatcccagcggcgatacattcgttaacaacatattggattaatggtttatctaccagtggcagcatttctttcggaatagccttggtggcgggcagcatcctggtgcctaatcccgctaccgggataacagcttttcttactttagaattaagggcagccattgaaatctcctggactgttcgttttttgaacttaatgtcaataaataacgcatcgagtatatcagtctgatcggttaaacctggtctgaaaaggtttggataccctcgaattaggacttttacgcataaaacgcagtgatagtaccactggtaatgtaggcccggtaatcccacctactaaaaatagattgaattgttcaatctgcagacaacatcaggcgtaaacgtcccctgccccccaaatttggcactgccatgatgtacagcgctggctaatttggttgaggtatgcgttgcccaacgttcctaacggaacgccgttactaatttgaattttatgctctccggtattcagcgtgccgttaagaccggcggaaaccagaattaaattttttaatccgctgtgataataaccaaccaacaatgggaattgacccggtaaattggcctggcggagtaattgattaacttgttttaacaatgcccccatttccggcaggcgctgcccctgatgagcaagttgttcttgcagcaaaccattaaacaaagcgcgtaataataatgccgccagaacgccattatcgccggcccgggtgacatccaggcaataaaacgccagatcgttttctgataacggcgcaatatccagcaccaaccccggcttatccgctgagataagctggcgataatggatacgacaatgggaaatctcctgctgcaccggcggctgaagttcttgtaataacctcgacgcggccagaggatcgctaactaacgcgtcccagtcttcaaatagccgctcttcctcttccacccgagaactaaacatagtcgggtagagacatgcaaacaccgtttcacgcaggcgattaaaatctttgaccggcttaagcaacacgtcctgcacgccaagacgcagagctttagcaatatccgccatgttttcggttgctgaaatcatcagaatcgggagctgttcaccctggttacgaacctgctcaaccagttcgaggccgttcatcctcggcatcgagatatcacaaatcatcagatccggtttcgaaatcgcgatttgctgtagcgcttcaatgccgtcttccgcctgacgggtagtcgcccccagggaagttagccagctatcaaggagagagcggaaaacgggttcgtcttcaactatcagaatctgttttcccgccaatggctgcgtcatgttctctcccctggctgacgataattaaatagtggcacgctattcacgctatcgcctgtcagaatttacttaagtgttggacaagtgcgctacgcggaagtgcgcaccaagggtaataattcatccatttttttctcaacggccaactgccctgcggccatcgcttcgccagcgcgatgaaaatcgagagtggagatttgcggacaaaacggctgtaacaagatatccggcggatcacctgccatacgattacgtttaaggcgattttccagcacctgaatcgaggtagacatgatctccatcgctgtgggggttatagtcgcacgacgagagctcattcttcccaaccgggagcgcaggcgagaatgccaactgagctcttctatcggctccgggcgaggagattcgatagataataggtcctgctgcataagatgggcatcatgctgaagatcgacggcaataacgatatccgcccctaacgctcgcgtcagagagaccggtaccggattgaccaccgcgccatccaccagccagtagccgttatgcatcaccggcgacatcaggcctggcatactacaagaagcgcggaccgccatgtgcagatcgccttccgtaaaccataattcgcgcccggtactcagattagtcgccacggcggcaaaacgccgttcgcaactttcaatttgcgcgacgggcataatttgccggtattgattgaacacccgctcgccgcgtaacagtccgccgcgccgccaggagagatccatcaagcgcagcacgtcccaattactaaaggaactgacccacttttccagcgcaggaagccgattacaggcataggccgcccccactaaggcaccaatggaacaccccgccaccacatcgacatcaattcccgcccgatgcagcgctttgatcaccccaatatgcgaccaaccgcgcgcggcgccagctcccagcgctaaaccaatcttaagctttctcattagtacagatacatatccttccactccgagcatggcattagcgctatcgctcagttaacataatgccactttggcgcgcgagcgccgtcattcttttccatggaggcgattttgtcgcaattatgcccctgtggcagcgctctggagtatagctcatgttgccagcgatatctgactggcggtcagcttgcgccgagtccgtcacagctgatgcgttcccgctatagcgcattcgtgatgaaggatgccgattatctcatcaagacctggcatccgagctgcgaagcgacgcattttcgcgccgatatcgaaaaaggttttgccaatacccagtggctcggtttaaccgttttcgccaccgccgatgggcatcaccccaatgaaggcttcgtcagctttattgcgcgctttactgaagataaccgccccggcgcgattattgaacgttccagattcttaaaagaaaacggacagtggtactatattgatggcacccgaccgttaattggtcgtaatgaccctgcccttgcggttcaggtaaaaaatttaaaaaatgctgcggccagtaggcccggcatcagcaattgcaaacacaacaggattttccccgcgatgcattcattacaacgtaaagtactacgcaccatttgccctgatcagaaaggcctcatcgcgcgtatcacgaatatttgttacaagcacgagctgaacattgtacagaacaatgagtttgtcgatcatcgtaccggtcgcttctttatgcggactgagcttgaaggtatctttaatgacgctaccctgctcgccgacctcgatagcgcgttgccggaaggctcaatccgcgaacttaatccggccggccgtcgtcgagtagtcattcttgttaccaaagaagctcactgtctcggcgatctgctgatgaaagccaactacggtgggctggatgtcgagattgccgcggttatcggcaaccatgaaacgctgcgcacgctggtggaacgtttcggtattccctttgagctggtgagccatgaagggctgagccgcgaagagcacgaccagcggatgggcgatgctatcgccgcccacgatccggattacgtggtactggcaaaatacatgcgcgtgcttaccccggagtttgtcgcccgcttcccgaacaaaatcattaatatccaccattcattcctgcccgcgtttatcggcgcgcgtccgtatcatcaggcctatgagcgcggcgtgaagatcattggcgccaccgcccactacgtaaatgataatctggatgaaggcccaatcatcatgcaggacgtgattcatgtcgatcatacctataccgccgaagatatgatgcgcgcgggccgcgacgtggaaaaaaacgtcttaagccgcgcgctgtatcaggtgctggcgcaacgcgtctttgtttacggtaatcggacgattattctttaatcgacagcgaaatgaattggttagctttgcggcgttacgcgtaaaaatcaggcaaccagtttaattttgtcaaaggaatgctttacaggggcgcgtcatttggtatgatgcgccccgcttcccgagaagggagcaggccagtacaaagcattaccccgtggtggggttcccgagcggccaaagggagcagactgtaaatctgccgtcatcgacttcgaaggttcgaatccttcccccaccaccattattcactacagtgatatggtttccccgacaagcgtaaacgatgtttgcacttagcgggaagggtaagaaccttcgactaaggttcgactcgagcgccagcgagagaacgttgccacaggcaacggcccgaagggcgaggagcgatagcgacgagttatccttccccaccaccattcattttgctgaatagcctacaatttgattttacccctggtggggttcccgagcggccaaagggagcagactgtaaatctgccgtcatcgacttcgaaggttcgaatccttcccccaccaccatctcccatgtcatgcccagcttaatctacctacgatattccatattctgccctgcgggaaggatgagaagcttcgattaaggttcgactcgagcgtcagcgagagaacgttgctgcaggcaacggcccgaagggcaaggcgctttagcgccgagtaatccttcccccactatcattgcactctctcagccacctttactgctatctcctcgctcgcgcttcgcttagcgaggctacaggtggtgccatttggtagcccggacaggtgcgcagcaccgcctccgggaaaactcacagcgggggtaatcgccgttttacaggcgaacttttcaccactgacgtattgcattgcgcatactctgccagaccatccaatattgtatccagttgcgcaatatcacggaccacgagacgcataacaaagcaatcctctccggtgaccttgtcgctttcaatacactccggcatagcctgaatatatttatctactttttgcagcaatcccggtagcggtcgtactcgaactagtgcctgtaggctatatcccaacgccgccagattaacccgcgcgctataaccctgaatcacccctttttcctccaggcgttttacccgctcggctgtactcggcgaggtcaaccccacctgcgcactcaataccttaagcgaaactctggcatcttgcgtcaggcaggccagaatcgcccggtctatttcatcaattatgtattccatttatttcacctaattaataaaggcattcatctgtttttaccttaattcagatatatcaagctgtcaggcttttcccgacaataatggaaaacttctggaggtgaaatatgcagctttctcgtggcgtctggcaaatgagcctggcgatgatcatttccggctcgattggcgcgttcgtgctgctctcagggttaccggtgattgatgtggtgttctggcgctgtcttatcggcgcggtcgcattattgctgtttattatgttaagccgacagcccttcagccgtctgacacgcctcactctggcgctggcagtcttgggcggcgtcgcgctggtcatcaactggctgctgctttttgccgcctactcacgtatttctatcgggatggcaaccgtggtctacaacacccagccctttatgctggtattactgagcatgatactgggtgaaaaggtaagcgcggtaaaatggggatggttactcctggcctttggcggcgtggtgattcttctctcgagcgaactgactcccgcccacagcgataatctcgtcactggcattatactggcgttaggcgcggcatttttctatgccctgaccgccattatcgcccgcaagctacagccgctaccggcgcagcatatcgcttttattcaggttatcgtgggtacggtaatgcttttaccgctggtccatgcccccgagtttaacagccactttccctggcgctatttactgatcctcggcatcgtccataccgggattatgtatcaacttttatatagtgcgattcaaaagctgccgacgccggtcaccggttcgctctcgtttatctatccgctagtggccatcctggttgactatctggttttccatcatgcgcttacgccactgcagctggctggagggtgctgattctgtttgccgctgcgggcaataactttggctggggtgaaaaaaaaccccgccatagcggggtgagtcagccgtcgcgaatgaactagcgacgcgcgcgcacaatctggtatttgcgcgtcaggtactcgaccggcgcgctccagatgtgaaccaggcgcgagaacgggaacagcaggaacagcgtcatccccagcaccaggtgaacgcggaagacgaacgccacgccatcgagatgctgagaagctccgccgtggaaggtcaccaccgactgcgcccagccgaccagtttcatcatttcgctaccgtccatatgctgggcggagaaaggaatggtcagcagtcccagcgcgcattgcaccatcagcaacgagaggatcagaatatccgctgtggtggtggtagcgcgaacgcgcgggctcagcagacggcgcttgagcagcagtaaaccgccgaccaacgtcatcacgccgcacgcgccgccggcaaacatcgccattttctgcttcacgtcgatcggcaggaaggactcatacatccagtgcggggtcagcatgccgaggaagtggccggcgaaaatacccaggatcccgatatggaacaggtttgacgccaggttcatccctttacgatccagcatctgactggaggcggcgcgccaggtgtactgaccgtagtcatagcgcagccagctgccaataaggaacactgaacccgcaatgtacggatagatgtcaaagaagaacatattcaggaagtgcattagtgctgtcctccgttagagatattcaaatattgcggggccacggctccggcaaaacggcgctggtgagcggagatttccgactcgccgcagccctggtcggcaaagaatttgacctgctcttcttcccagacggcatccagcgcctgcggcgtatcgtcgcgggcctcgtcggcgatcttctccgccactttctggctatcgacctgagtattggcaagcttcaacagcagctcgaacagcatcgcatagcggctttcgcgctgttgcagacgcgcgctgagcaggccgaggatcggcgcaacgtcccgcaggccgccaagcgcgtcctcttccggcagttgcgccagatactccagatacagcggcaggtgatccgggagctcatggctatccagcagcagaccgtggcgctcgtactgcgccatcaggtcgaccatcgcctgcccgcgatcgcgggactcgccgtggacatgttcgaacagcagcagcgaggtagcgcggccgcggtcaaacagctcgctgtacgccgactgggcgtccagcggatcctgagcaactaaatcgcgcaggaaaacgcccagcgcctgggcatcttctttggcgagtttttccgatgacgcgagagcctcgaacatctcctgctgatgctgccacaaggcagcatcagggtattcgagcagacgcgacacaatcacgagttcaatcatgcgtgcggctccgttttgctggtaacgtcaatggcgtcaatgcgacggctgttaaacaagttgaattcgctgtcagaaccgtggcaaccatcgccgaaggtaaagccgcagccgctcttctccgggaaggcatcgcgagcctgttcgcgatggctgctcggcaccacgaaacgatcttcgtagttggcgatagccagatagcgatacatttcctgcgcctgcgcttcgctcagccccacctcttccagcgcgcgggtatcgacgacgccgtcgacggtttccgcacgtttgaagtggcgcatcgccagcatacgtttcagcgccagcagtaccggctgggtatcgcccgcggtcagcagattcgccagatactggactggaatacgcaggctttctacatccggcaggatcccgttgctacccagttcccccgcatcggcggcggactgaatcggcgacagcggcggcacgtaccaaaccattggcagggtgcgatattccgggtgcagcggcagcgccagcttccagtccatcgccattttgtataccggagactgctgcgcggcttcaattacgccctgcggtacgccatcttttaacgcctgttcaatcacttttggatcgtttggatcgaggaacacgtccagttgacgctgatacagatctttctcgttctcggtgcttgctgcgttttcaatcgcgtccgcgtcgtagagcaggacaccgagatagcgaatacgtcccacacaggtttcggaacacaccgtcggcatcccggattcaatacgcgggtagcagaagatgcatttctcggatttcccgctcttccagttaaaatagatcttcttgtacgggcagccggtgatgcacatacgccagccgcggcacttatcctggtcgatcagtacgataccgtcttcttcacgcttatagatggcgccgctcgggcaagtcgcgacgcacgccgggttcaggcagtgctcgcacaagcgcggcagatacatcatgaaggtgttttcgaactggccgtacatcgccttctgcatgttttcgaagttctggtctttggcgcgtttttcaaactcgccgccgaggatctcttcccagttcgggccgctggtaattttgtccatccgctggccggtaatcagcgagcgcggacgggcgatcggctgatgtttgctttccggcgcgttatgcagattctggtagtcataatcaaacggctcatagtaatcatcgatccccggcagatgcgggttggcgaagattttacccagcagcatcgcgcggttgcccatgcgcggctgcagcttaccgttgattttgcggatccagccgcctttccatttttcctggttttcccagtcgttggggaaaccgacgcccggcttactttctacgttgttgaaccaggcgtactccatcccttcacgactggtccagacgtttttgcaggttacggagcaggtgtggcagccgatgcatttatcgagattcagcaccatgccgacttgtgaacgaattttcattttacgctctcctgtacctggtcattaccttcgccgtctaaccagttaatgttcttcatcttacgtaccacaacaaactcatcgcggttggaaccgacggtgccatagtagttaaagccgtacgccaggtggccgtagccgccgatcatatgggtcggttttggcgtaatacgggtgactgagttgtggatcccgccacgctgaccggtaacttcagagcccggcaggttcacgatacgttcctgcgcgtgatacatcatggtcattccggccggtacgcgctggctcactaccgcacgcgccgtcagggcgccgttggcgttgaatacttcgatccagtcgttatcttcgatacccagatctttcgcgtccacttcgctcatccagacgatcggcccgccgcgcgacagggtcagcatcagcaggttatcgctgtaagtggagtgaatccccacttctggtgcggcgtcaggaagttcagagccttctccggattgccgttggacttctcgcccatcaccgctttcaccgaacgggtgtcaatcggcggacgatagaccagcaggctttcgccaaagtcgcgcatccactggtgatcctgatacagcgactgacggccggacagcgtacgccacgggatcagctcgtgaacgttggtataaccggcgttataggagacatgttcgtcttccaggccagaccaggtcgggctggagatgatcttacgcggctgcgcctgaatatcgcggaagcggatcttctcgtcttctttattcaacgccaggtgcgcatgctcgcggccggtaaattcgctcagcgctttccacgccttcacggctacctgaccgttggtttccggcgcgagagtgaggatcatctcagcggcgtcgatagcggtctccagcttcggctggcctttcgccgggccttccgccttggtgtagttgagcttacgcagcagatccatctcgctttgggtgttccaggcgatacctttaccgccgttgccgatggtttccagcagcgggccgatagaggtgaagcgctcataggtcgccggataatcgcgctcgaccggaataatatgcggcgcggttttacctgggatcaggtcacattcgccttttttccagtctttaacgtcaaacggctgcgccatttccgcggcggaatcgtgctgaatcggcagcgtcacgacgtcggtttctttgccgaggtggcctacgcagacttcagagaatttcttagcgatacctttatagatgtcccaatcgcttttggattcccaggccgggtcaacggcggcagacagcgggtgaataaacggatgcatatccgaggtattcatatcgtctttttcgtaccaggttgcggtcggcagtacgatgtcggagtacagacaggtgctcgacagacggaagtcgagcgtgaccaccagatccagcttgccgtcgagaccgttatcctgccactcgacttcttccggcttcacgccgccctgcttgccaaggtctttgccctgaataccattctcggtacccagcaggtacttgagcatatactcatggcctttaccggaagaacccagcaggtttgaacgccagataaacaggttgcgcggatggtttttaccgttctccggctgttcggccgcaaagcgaatagacccctctttcagcgatttcacggtgtaatcgaccggcgtcatgccggctttcttcgcttcgtcagcaatacgcagcgggttcacgcccagctgcggcgccgacggtagccagcccatacgctctgcgcgcacgttaaagtcgatcaggtgtccgctgtagcgggatttatccgccatcggcgacagcaattcctgcgcggtgaccgtttcatagcgccactggctggagtggttatagaagtacgaggtactgttcatgtgacgtgccggacgctgccagtcaagggcgaacgccagcggctgccagccggtctgcggacgcagtttttcctgaccaacgtagtgcgcccaaccgccgccgctctgaccaacgcagccgcagaagatcagcatgttgatcagtccgcggtagttcatgtccagatggaaccagtggttcaggcccgcgccgacgataatcatcgagcggccatgggtcttatcggcgttatcggcaaattcgcgagcggtacggatgatatgcgcgcgggatacgccagtgattttttctgcccaggccggagtgtacgctttgacgtcatcgtagctggtggcgcagttttcatcgttaaggccgcgttccaggccgtagttcgccatggtcaggtcataaacggtggtcaccagcgcggtggagccgtcggccatctgcaagcgttttaccggcagtttgtgcagcagaatattttcgaggtcgactttgttgaaatgctcggacccttcgccgccaaagtatgggaagccgacgttggcgatatcatcatggctgccaagcaggctcaagcgcagttcaatctcttcgccggttttaccatcgcgctgttcgaggttccacttgcctttatcgccccagcggaagcccagagaaccgttaggtacggtcatttcgcccttctcgtcaaaggcgacggttttccattccggattctgctcctggcccagggagtcaaccaggtcggcagcgcgcagcatacggccagcggcatagtagccgtcgcgctcttcgagcatgaccagcatcggcatgtcggtatagcggcgtacgtaatcggtgaagtactggctaggtttatcgaggtggaactcacgcagcatgacgtggcccatcgccagcgccatcgcggcatcagtcccctgcttcggcgccagccacagatcgcagagcttggcgatttcggcatagtccggagtaatcgccacggttttagtccctttatagcgaacttcggtaaagaagtgcgcatccggggtacgggtctgcggaacgttggagccccaggcgatgatatagctggagttgtaccagtcggcagattccggcacatcggtctgttcgccccaggtcatcggcgaggctggcggcaggtcgcagtaccagtcatagaagctcaggcaggtaccgccaatcaacgacaggtaacgggcgccggacgcgtaggaaaccatcgacatcgccgggattggcgagaagcctgccacgcggtctggaccgtaagttttgacggtataaacgtttgaggcggcaatcagttcgtttacttctttccatgaagaacgaacaaaaccgccgcgaccgcgggcctgtttaaagcttttcgctttatcggcattttcaataatagaagcccatgcctcaaccggatcgctatgctgaactttcgcttcacgccacatcttcatcagacgtttacgcatcagcggatatttcaggcggttagcgctgtacagataccaggagtagctggcgccgcgcggacagccacgtggctcatggttcggcagatcggggcgggtgcgcgggtaatcggtctgctgggtttcccaggtgaccagaccatttttgacataaattttccagctgcatgagccggtgcagttcacaccgtgagtggaacgcacgattttgtcatgctgccaacgctggcggtatccatcctcccaatcccggttggttttaagaagctggccgtgcccatcggcaaaggtttcacccttctgtttgaagtagcgaaaccggtccagaaatttactcatcgggtttctcctgatatggagcctgacggctctctgataaatcgacattgctggatttgcagcgaaaatagcgccatgccggaggaggagaattgatggcgatcaatgcgaaataccttataaatcgacactcaacccattaataccaccaaagtagtaacagtgattatttattatttctttgatttaaaaagattattttaaatatgacagaatgttaaccaggatttatgccacgcttaggtattaagtggtagatggcataccgatagttatctcctgaattcaatgaccttgcgctcataacagtatgttgtaactaataacaggtaataaaaaaggcgcaccctgtggcgcgccctgtcacttaccgttaagaacgacttatttctgtttacggccgtataccgcccaggtgatcactacgcaggcaatatagaacacaaggaagactttcattgccccggccggcgagccggtcagatccaacgaaataccgaacgctttcggaataaagaaaccaccgatcgcgccaatcgccgaaataaagccgagtgccgcggcggtatccgtcgccgcttcacgcatcgcctgtgcttcactgccgccctgagctttcacgcgatccatcgtaagcttacggaagataacggaaatcatctggaaggtggaggcgctgcccagtccggcggtcaggaacagcaccataaataccgcgaagaaggcgatgaagttgcccccctgaccatttgtcggcagagtcaggaacagtaacgcgcagaaaatagccatcaccacgaagttcaccagcgtcacgcgggtcccgccgagtcggtcagaaatcgccccgcccattgagcgcgccagggcgccaataaacggaccgaagaaggcatagtgcaggatctgcacgtccgggaactgggtttttgacagcatcgcaaacccggcggagaaaccgatgaaggagccgaaagttgccagatacagcagcgccataatccacagatgcaggcgtttaagtaccggcaactgttcgctcagcgacgctttcgaggccgacaggtcgttcataaagaaccacgctgccagggtaaagataatcaggaaaggtacccagatccacgcggcgttttccagatacagcatcgagccatccggctgctcgctaccgctaccgccaaaaacggcaaagatagagagcgagaccaccagcggcgcaaccaactgcattacgctaacgcccatgttacccagaccgccgttaacccccagcgccccgccctgtttctctttcgggaagaagaagctgatgttcgccatactggatgcaaagttagcgccggcaaagccgcacagcagagaaataatcacaaacacgctgaacggcgtggaggtatcctgtaccgcaaagcccagccatacgcacggaataatcatgataccggtactgaaggctgtccagcggcggcctccgaacagtggcaccataaaggcataaggtacgcgcaataatgcgccggaaagcgccggaagtgcggtcagcataaacagctgatcggtagtaaattgaaagccaactttattaaggttcacggcaacggcgctgaacaacatccagacgcagaacgccagtaaaagacagggaacggagatccacaaattgcggctcgccacacggtggccgcgctgttgccaaaactcaggatcttcaggacgccagtcggtgatgactgagctgttagccttctccgggattgaagagtgactcatagatacctctgattattcatatttcctgatgctaccttaggggttgctcaaggctgtaagttgatataaatcaaaggaaaagcgcgggccattttgtgcaaaaataaaccatgctccgaagtgagtagataattgtgagaaaaaaagtgtggtttttcacgcgactgccgggtttcttgttatccctcccaccacggcgtctaccaccgacaattaaggggtaataccttaggggtatgggtatactccaggggatagctgagaataagcgtcactcccggagagatgacccatcaggagccacccattccatgttaaaacgtttgtttacgccgctcacattggttaatcagctggcgttaatcgtactgctcgccaccataatcggcgtggccggcatggcgatatccgcccgcctggtgcatggggtgcagggtagcgcccacgccattaacaaggccggttcgctgcggatgcagagctaccgcctgctggcggcgattccgctgacggacaacgatcaaaagctgtttaacgatatgaccgctaccgttttcagcccggagttacaatactccgcgcgtcgtgacggccaggaaatacagttgaaagcgctgcaacaatattggcaactggagctggggccaggtatgaaacaggccgtcaggcaaagcgatgtggcacaggatgtcgccgattttgtcgatcgtattgaccaattggtcaccgcttttgaccacacaaccgaacaacgtatcgagcgcgtggtctggatccaccgtatcctcgccgttggcatggcgctgctgctgatctttaccatcatctggctacgtgcccgtctgctgcgaccgtggaaacagttactgggtatggcgcgggcggtcagccagcgcgactttacccagcgcgcgcatattagcgggcgcaacgaaatggctaccctcggcatggcgttgaataatatgtcggaagagctggcggaaagctacgccgtgcttgaacgacgggtacaggaaaagaccgccgggctcgagcagaaaaacgagatcctggcctttttatggcaggccaaccgtcgtttgcattccagcgccccgctgtgcgagcgcatctcaccggtgctgaacggtctacaagggctgacgctgttgcgagatattgaagtacgggtttatgacctggaagatgaagacaatcatcaggagtttgcctgccactccgatatcgaatgcgatgataaaggatgctatctgtgtccacgcgatctgccgccgctgccggatggcggcacaacgctgaaatggcggctatcagacgcgcataaccaatatggcatcctgctggccacgctgccggttggccgccacctgagccacgatcaacagcaactggtggatacgctggtggaacagctgaccagcaccctggcgctggaccgccatcaggaaaaacagcagcagctcatcgtgatggaagaacgcgccaccatcgcccgcgaacttcacgactctatcgcccagtcgctctcgtgcatgaagatgcaggtcagctgtctgcagatgcagggcgatagcctgccggatgagagccgggtgctgttggggcagatccgcaacgagctcaacacctcatgggcgcagttaagggagttgttaaccaccttccgtctgcagctcaccgaagcgggtttgcgtccggcgctggaggccagctgtcaggagtacagcgcccattttggcttcacggtgcaactcgattaccagttgccgccgcgttttgtcccgtcgcatcaggcgattcacctgttgcagatcgcccgcgaggcgttaagcaatgcgttgaagcatgccaacgcgacggaagtcaccgtgaccgtgtcacaacgcgataatcaggtacgtttagtcgttgccgataacggccgcggcgtaccggaaaacgcggagcgaagtaaccattacggtttaattattatgcgggatcgcgcgcaaagcttgcgcggtgactgtcaggtccgccgccgggagaccgggggtaccgaagtcgtggtgacctttatcccggaaaaatcgttttcaatccaataaggagacccctatgagtcaacaggaacgggcaaccatccttctcattgatgatcatcccatgctgcgcactggcgtaaagcaactgattagcatggcgccggacattcaggttatcggcgaagccagcaatggcgaacaaggtatcgaactggcggaatcgctggatccggacctgattctgctggaccttaatatgccggggatgaatggcctcgaaacgctcgacaagctgcgtgaaaaatcgctctccggccgcgtggtggtattcagcgtctccaatcatgaagaggacgtggtgaccgccctgaaacgcggcgccgacggctacctgctaaaagatatggaaccagaagatttgctgaaagcgctgcagcaggccgctgcgggcgaaatggtattaagcgaagcgttaacaccggtactggccgccagcctgcgcgctaatcgtgcaacgtccgaccgcgacatcagccagttgaccccgcgcgagcgcgatattctgaagctgatcgcccagggcctgccgaacaaaatgattgcccgccgcctggatatcaccgaaagcaccgttaaagtgcatgtgaaacacatgctgaagaaaatgaagctgaaatcacgggttgaagccgccgtctgggttcaccaggaacggatcttctaaggcgattccgtccaggaaacctcgggagccgtaaacgtcaccagcggctcggtcagcgccagtgcgatctcattggaagagacgcgctgacccgatttatcttcaaccaccaccgacagacgccagcgattcaccgcgcccggctcgctgttccacaccggcataatgatgctccagccatccgcactattggcattaaccggcggcgtcaggcttagcgcctgagtgtccccctgccaatgcagcgatttaatgccgtgcaggctattaatttgcagcttcagctgtaccgtttcgccggagtgcaaatcccacggcggcgtcgccagatagaccgtcagattcttacgctgtcgatactccactaccggcagattatcgcgttccggactatcgtagcggctgccgcgtagcgagttgctgatagccacttcatccgccgccagttgctgtttcagcggaaccccaaaacgataattcagcttcaggccgacattattctgactgacgccattttcgccctgtttgtgcttagcggtgaccgtcaccaacggtaccggggtgtaattcagtcccaccgaaaccgccactggattgtggtatccggtaccggaatgaaacagatcgacgctatcgccaaagtactgttcaacgctgacgctggtattgatgtgctgataaaacggcaatcgcgcctgggcagtcacgtcatagccgacggccatccgctgctcctgggtctgattttcccgcaactgccagtcgccaagtgggtggtaatagttggccgataagcgcaaatactcgccccaggcttccgcgccgatgctgccgcgcgccaggctctcgctgagcactttgtcgtaaaacgagttataacccagcagccagctaccgacacgccagcgctggccgagcccaacattgcccaccagatcgttctcgcgccgggtaaccgaatattgattccaggtgaggtaacgctcattgtcctgcagcggcacaaaccagctacccttgctgccggtgaagttaccctctttatccaccaacaggtcgatattggcattaccccacggcgacagccagttttccagttgatggctgaactcattgccgattttgctgatggcgaacatccgcgcctgctcgccggtggtgagtccgttatcgctcatgctggcttcgccgaatttcttggccatctcggcgaaatgtttggcatcgtcgtcgacctgcggcgctattcctaaatcgggcagcgtagtttgcggcggcatactgttatcgttggcaatcagcgcccaggcgggagtgcctgtcagcagcaggagaagcgtcagtgatggggttaagcggtacggcaaaggcatcaaacggattaacgtaagctcacggggaataacaacatcacgttagtttatcgttttttgcccttcccgcagccctgtgggccattccaggaataaactgaaaccggttggcgtttgttttcccctatcatcaaaccggcgttcgggtttgatttgccgccagcagcgctttgagttccggaatacaggaaccacagttggtgccgcacttgagcttcgcgccaagcgcctctacgctgacgcaaccgccggcaatagcctcaccgatctgccgctcaccgatactaaagcaactgcagatagtctgcccacgcggcgtgctgtcgccgcccttacggccgctgagcagcgcatggcgtagcccggcggtctgcggcggcgtccggaacgccgtatacagccattcagcatcgatttgcggcggcttaatatcgctccagcagccgagcatcaattttccatcgtgccaggccagtaggttccacagccaccgccctcggcaatttgcaactgccatccctgcttgcggcaccactcggtcagccagctttgcgggccggtgtccgcggctagcgacaaatggctgagctctaccgccgcccgccgccgccagtgcagcgaggaaggcaacggcaagggctcgcgagataatagctccccttgccacgccggccgccacggcgctatcgctaccgccgactgcttgctctccggctgccccgaatgcggatcggtgaccgccgccagtaagttattgacccgcccctggcgggcaaactgattattccagtgcatcggcacaaagagtgaaccggcgcgctgcccttcgctgactatcaccttcgcaatcatcacgccgtggcgcgaccagacgcgagccagttctccctctcgtaattcaaaacgacgagcgtcggcaggcgccacctcgacgaccggttcggcaatatgctgcatcaaccgcggtatgtcgccggtgcgggtcatggtatgccactgatcgcgaatacgtccgctattgaggatcaatggataaaatgcctcggtctgcgcccgggtcggctgcggcgacactggcaccatccgcaacctgccgtcgccgtgccagccctccgttaaccgccagggcgcggcgctgcggctcaccggccagcgcaccggcgccagggcatcccacgcctcccggctgaggtccgccagcccgccaatatcaaacgcccgctgaccgtcattttcaaatcctgagagcgccgcgtgttcacaaaacacctcatgcggatgttgccatgaaaaagcccgggcataacctaattcggcggcgagacgggaaatgatccaccagtcggctttcgcctctcccggcggcggcaaaaaagcccgttgacgcgaaattcgccgctccgagttggtcacggtaccgtttttttcgccccatgccagcgccggaaagcggatatgggcaaagcgacccgtatcagtattggcggcgacatcggagaccatcaccagcggacacctggacagcgcctgactcaccgcgtggctatcgggcagtgagaccaccggattggtccccataatccacaccgctttgacctcgccgcgtccaatcgcggcgaatagttcgacggcggttagtcccggcgtctgcgccagtcgctcgctgccccaaaaacgcgctaatcgctgcaggtcctgcggctcaaaattcatatgcgccgccagcatcgtcgccagtcccccacttcacgcccgcccatggcgtttggttgaccggtcagcgaaaacggcccgcagccgcggcgggcaaatttcccgctggcaagatggacattgataatcgcgttgcacttatcgctgccgctggcggactgattaattcccatggtgtacagcgtgatggcgcgcggtgcagcgataaaatcacgataaaagcgggccacctgctccggcgccaggccgcagaatgcggccgctttttccacgctccattgcgcggcgatggtcagcgcctgccgctggtcgcgaaaacccgccgccatttcaccgctggcggcaatggcattaagcaggccgacaaatagcccgccatcgctaccgggcgccaaggccagatgatcgtcggcaatatcgcaggtcgcggtgcgtcgtggatccaccaccacgatccgcaaccgcggattatcgcgtttcgcctgcgccaaccgctgatagagaaccggatgcgcccaggcggcgttggagcccaccagcaccaccagatcgctttgctcgacatcttcataactgcacggcacgacgtccgcgccgagcgcccgcttatagccggtgaccgccgatgacatacataaccgcgaattcgtatcaatattggcggcgccgataaagcccttcatcaacttgttggcggcgtaataatcctcagttaacagctgaccggaagcgtaaaacgccaccgcctgcgggccgtagcgctcaataatgtcgcgcagacgtgaacccgcctccgccagcgcctgcggccagccgaccgcccggccatcgacttcagggtgtaataaccgcccggtaagcgaggtcgtttccccaagcgctgccccttttacgcacaagcggccaaagttagcgggatggttttcatcgccgcgaaccgtgacggttccgcctggttcaacgcgggcgataactccgcaaccgacgccgcagtatggacaggtggttcgggtttcgctcatcagctcgcctccgcgcgcagcagcaatgcctggttgccgacccacactttgccctgttcgatcttcaccggccacgcgcgcaccgacggctcgccgctgtcgtacaagcgaccgtctcgcaagcgaatccgctgtttatagagtggcgaaatgacgatcggctcgccgcccgcgtcgcctaaaatgccgcgcgataacacgttggcctcgctgccgggttcctggttatccagcgcataaacttgctcgccgaagcggaacagcgcaatctgccgctcgccgaggcgcgcgccgatcccgcctgcggcgggatcgcgtccagatcgcagatcgcctgccacggccgcgacggcagggccggttgcccaagcccttgcggcgccaccagctgcggctggccgcgcaggatttgccgctgcaccgcctcatcggcctcatcgctgttaacataggaacggaatagcgccagccgctgtgggtcgttcagggtggtctgccattcgcactggtagctatccaccacccgcgccatctcctgctccagctcatcgccgataccgagactatcgtgcaagatcacctcgcgtagatacgccacgccgccttcaaggttatccatccagctactggtgcgctgcaggcggtcggcggtgcgaatataaaacatcaacaaccgatcgacggtacggattaggctggcgtcatcaaggtcactcgcaaagaggtccgcatggcgcggtttcatcccgccgttgccgcagacgtaaagattccagcccttttcagtcgcaataaccccaatgtctttaccttgcgcttcggcacattcgcgggtacagcccgagaccgccattttgattttgtgcggcgcgcgcagccccttgtaacgatgttcaagccttaccgccagccctgttgaatcctgaaccccatagcggcaccaggtcgagccgacgcaggattttaccgtgcgtaatgatttgccgtaggcgtgtccggtttcaaatcccgccgccgccagttcgcgccagatgtccggcagttgctccagccgcgcgccaaacaggtcgatacgctgccctccggtcactttactgtacagctggtaacgtttggcgatatggccgatagcgataagcccgtccggtgtcacttcgcctgcggccatccgcggcaccaccgagtaagtaccgtctttctgaatattggcgaagtagcgatcgttggtgtcctgcagcggcagatgcgccggtttcagcagatactcattccagcaggaggccagtaccgacgccaccagcggtttacacacttcacagccgtggccctgcccgtaacggctaatgagctgatcgaaggtatggatgtggttgactcgtaccagatgatagatctcctgccgcgaccacggaaaatgctcgcagatatcttttttaacctcgacgccctgcccggcaagctggtgttccatcacctgtttgaccagcgcgctacagccccgcagccggtcgccgctttagtgcagctttttatcgccgccatatcgcccgctccggcgctgaccgcctggcaaatgtctcccttactgacgttatggcaagagcaaatctgcgcgctatccggcagcgccgccacgcccagcgctttcgtcgtggccccatccatggccgggaggatcagactttccggacgagacggtagcgccatgccgttcagcatcatctgcaacagcgtcgcgtaatcatcggcatcgcccaccagtacgccgcccagcagcgttttgccatcagcgctgacaacgatctttttgtagatctgccgcggaccatcggtccattgatagatctggcaaccaggagtacgtccgtgagcatcgccaaacgacgccacatccacgccgagcagtttgagtttggtgctcatatcggcgccgttaaaacgggccgcttcgccagccaactgcgccgctgcggtgcgcgccatgtgatagcccggcgccaccaggccataaattttgttgtcccacagcgcgcattcgccaatcgccaatatatctgcgtccgaggtccggcagtggtcatcgataccgataccgccgcgttcgccgattgccaggcctgcgccgcgcgccagcgcatcctgcgggcggatcccggcggaaaagaccaccatatcggtatgcagcgtgccgccatcggcaaagttaagctgcagcccgtcggcggtgcgcactatcgaggtcgtcgctttgctggtatgcacgccaacctccagatcgagaattttctcccgcagcatcgccgcgccgccgttatccaactgcaccgccatcaggttggcggcgaactccaccacatgggtcttaagccccaactgttttaacgcgttggcggcttccagccccaacagcccgcctccgatgaccaccccgctctgcgcagtggcggcgcggtcagcaatgcggtcaagatcgtcaagcgtacgatagacgaagcagccttcttcatcgttaccggagattggcggcacaaagggataggagccggtcgccagcaccagcttatcccaatgggtttcatggccgtgggcatcgcgcacgattcgcgccggacgatcgatttccgcgatcgcctccctagccgcagctcaatcccgtactggctaaaaaagtctccctctaccagcgatagcgactctgcgctgcgcccggcgaaatattccgagagatgaacccggtcataggcggcatagcgctcttcgccaaaaaccacgatacggtactgctggtgcaggttccggctcacgcattgctcaagaaaatggtggccgaccatgccatgtccgaccagcactaatacaggtttagtcatcgtcatttttcctgcagcccgcggctgcgttatagaagggtcaaaaagccactccgctgaaggagacctatcgctgccgagcagcgcggtaagcggcgccgactgctggcagtcgcccagcagcagcacgccgtgcagccggccatcgcggataagcaggcgtcggtagtggcgatcgatggggtcccaactgctgtagatctggtcctgctcgccggccagctgttcgccggcgctaaaaaactcgatgccagtgaccttcagccgggtgccgccgtcctgccagctgaattcttcgtcggaagacccgcacaggcgttcaactaacacatcggcctggcgcaaacagggggccaccagtccccaggtttggccgtcaatctcacaacactcgccgatagcgctgatctccggcagcgaggtcgccatccggcggtcgacgataatccccgctggcaggctacaccgctgcgcgtcgccagacggatatccggccgcacgccggtggctaacaccacccggctggcggcaaaagcgcgcccgtctgccagccgcacatgctgctcgtcaatagcggcaattcggctctccagcacgcagcagatgccgcgtgcctcaagctgttgttttaactgttccgcggcaaatgcatcggtaagcggctccatcaaaccgctaccgcgatggagtagcgtcacttccccaccgtgacggcgcaacgccgccgcgacctccacgcccagtacgccaccgccgattaccaccgccgggccggggattgccaggatgtctttaacatccgccagggtgcgaaaggcgaatacctgcgggcgctcaatgcccggcagcgacgggataaatggctgcgatccggtggcgaacaccagttcatcccatcccagccagtcgccgccgacgcgtagcctccgccccgcgacatccacttcgctgaccgcctcgccaagccgcacgcggacaccatgctgggcgtaccactccgtcggcagcagttgtatttgcgccgccgttttttccccgccgagtaccggcgagagctgaattcggttgtaggccggctgcggttcatcgccgattagcgtgatgatgaaacgcccctgcgcgcgcgccgccagcttctcagccagccgggttgccgccataccgttgccgataatcaccagtcgccgcatcattccgccttacgccgctttcggctgcttttcgtagaggaaatggaggatctgctgacgcaggtggtggtagcggttatcttccgccagttggacccggctacgcggacgcggcagattaacgtcaaggatctcgccgatcgtcgcggccgggccattggtcatcattaacacccggtcggaaagcagcaccgcttcatcgacgtcatgggtgatcacgacaatggtggtgttcagttcctgctggatgtgcattaccgcgtcctgcagatgggctcgggtgagcgcgtccagcgcgccaaaaggctcatcaagcagtaacacttttggcttcatcgccagcgcgcgcgcgatgccaacgcgttgcttcataccgccggagatctctcccggccgtttgtgcagcgcgtgccccatctgtactcgctgtaaattgtgttcgatccactcccggcgctctgccttgctcatggtgcggcgaaacacctgatccaccgccagcgccacgttgtcaaaacagctcagccatggcagcagcgaatggttctggaacaccacagcccgttcaggccccggcccggaaatttcacggttatcgcataacagtccgccctcagtgggctgggtaatcccggcgatcaggttcaatagcgtggattttccgcatccggagtggccaatcaggctaatggtttccccttcgtgaatatcaaaggagacgttttgcagcgccaggaactcgccgctggcggtgttaaagcgttgactgacggcctgtacctgaattaatggtttcatagcgactccttatttttcctgccagctgaagcggcgggcgagcaacatgagcccctgttcaagcagcaggccgacgacgccgataatgacgatggcgatgatgatgttttccacattgaggttgttccattcattccagatccaaaacccgatacccaacccgccggtcagcatctcggcggcgacgatcaccagccaggcaatacctatcgacagccgcacgccagttaataccgcgggcagcactgccggaaagaggattttgcgcatcaccgaccattccgacagctgcagcacgcgagccacattgagatagtcctgcgggatacgcctgacgccttccgcggtgttaatgaccatcggccagatagagcagataaaaatggtccagctggaagccggttccgccttctggaacagcagcaggccaatcggtaaccacgccagcggactcaccgggcgcagcagcgcgatgagcggattaaacattcgcgcaaagaacagcgagcggccgataagaaagcccagcggaataccggccagcgccgctaaaccaaagcccaccgcgacccgctgtagcgaagccagcacgttccagccgatgcccatatcgttcggtccgtcgcggtagaaggggtcggaaaacagcgtcagcgccgaatccagagtgctcaacggcgtcgggaagcctttcgcgccaatcgccgccagctgccagccgagcagcagcagacccaggcccagcagtggtggcagcagacgctgcagcgcggcattaagccagcgcctggcgaacggtgtagctttgcgcacctgcagcggcggcaggacaatgatttcgcccggcgcggttgacgtctgcgcgcgcggctgcgtgttaatggctggtttcatctcatgcccccttatgttgaatggcgaaactggcggcgtacccttccgggtcgatgccgttccacactttgccgtccagcagcgtgctgctgcgtagcgtttgcgttggcgcagtgataccgcccacggcctgcgccgcctctttccacaggtcgatgcggttgatacgctgcgctaccgcctgataatcaggcgcgcttttcagcaggccccagcggcggaattgggttaagaaccacatgccgtctgagagccatggataactggcttcgccctgctggaagaagcgcatggggtgatcgtcgcgccagcgtttgccgatgccgttgtcgtattcgccaagcattcgaccgctaaggtactgttctttggtgttgagccacgcgcgtctggcgaggatccgcgcggtttcgcgggtgttgtcggcagacgcttcaatccagcgctgtgcctccagcagcgccgccaccagcgcccttgcggtatttgggtagcgcgccacccaatcgctgcgcgcgccgaggattttttctggatgatctggccagatttgctggctggttgccgccgtaaaaccaatgcgatcgttgatcgcgcgcgcgttccacggttcgccaacgcagaagcccaccatattgccgatgcgcatgttcattaccatttgcggcggcggcacgaccaccatgcgcacatcggcgaaaggatcgataccggcattggccagccagtaatagagccacatcgcatgggtgccggtaggaaaggtgtgggcgaaggtgtagctgcccggcgctttttggccgatcagccgcttgagcccatgactatcgctaacgccttgcgcctgcaggtcacttgagagggtgatcgcctgaccgttgcggttcagggtcatcaggttggccatctgctgcggtttgccggcaataccaagctcaaggccatacagcatgccgtagaggatatgcgccgcatcgagttcgccggcaaccagcttatcgcgcaccgccgcccaactggcctccttacttggctgcaggctgatgccatactttttatcgaatcctttcaatgccgcgatcgccagcggcgcgcagtcggttagcgggatgaatccgacccgcacggtggccaactccggtttatcagaacccgccgcccacgccgcctgcatcacgccgggcagcagcatagcgccgctcagcgccgccccggcctgcaaaaaacgccgtcgtgaaatgaaaactttatcgcccatagccgctccagaacgcgcaaaaaaaagcgcccggcagtgctttcgcaccgcaggacgcctttatccagagatcttcagaccgccgttggcccgttatctcaaattgttgattcactcaagttcagtaatgcaaagcagatgccaatttatcattgcccgcctggcgtcgttttaccgctccgccgcgtaaacttttgcaccatcgtcaggcaaccctgctcgctgattgtgcattcaatttgacgatgagtccggcagcagagctttcaccgtcagcaacgcgcgggcgatttcaaccatccgctggttcttatccatcgccattttacgcagcgcctgccaggcttgttcttcttgcatcccttgatggcttatcagcagcgctttcgccttatcaataatcttgcgctcctcaagcgtcgctttcagtgaagccagttggccggaaagttgctcaagttcccacgcctgctggcggaccagcggcagaagctgcttatccaggcgcaaagtcaggctatcgccgcactcttcttcaggccattgcagcggcggcatatcgtcttctccacgttctagcaactgccgggtcgcgctgagcagatcggcaatcaacgcctcctccagaccgcgcatctgctcaagccgttcagtttgcaggctaaaccagcgctgcgccgcggccccttcgtccgccgagggctggcgggtacaggcgatgcgccgcagttgctctatctcgcgcccggcttcgcaaccctgcatcagctcaagcgtccgtggcagaccggaaagtgcctgaaagctgtcaaaacagggctgctgaccgtcaatgcggtcaaccagttgctgacggagctcgccgttaaattggccgcgcgcgaagcccaacgctcccagcgcgcgctcctggcccgccagctctttaccctgcataaagctgtacagggcgaccatacgcccggcgatctgcggatcgtcaatgctgtcattcaactgcggcacaatattcaataaatggcgaataatacggctaaaacgctgagtggcctcctgagcgtccaccgcgcggccttgcaccgccgtccgcagcgccggaagctgcgccagataccacaccgcgctggctattcgccaacacagcgcgctgctggcggattcccgcgccggttgcagcgcagcataaaaagcgcttaagcgcgcgtccaccagcgccccgccagcccgacgctcggcgtcatacaagcggccatcggaagagagccacatattggaggcgccgcgctcgcactgcagcatatgaaccaacccacttatttcgctcgccagcgtcccttgctgcgttagctggcggagctgctgtttttgtagttggcgcgcataatgaaaccagccgattgcttcaggcgtcatgccggtcgtattattcataccccctcccgaattacgtctttaggtaaagctaagcaataaccgtgcctgataaaaggagtctttatgcaacgtattgtgattgtcgccaacggcgccgcctacggcagcgaatccctgtttaatagtctgcgactggctatcgccctgcgcgagcaggagtccgacctcgatctgaaactgtttttaatgtccgatgcggtgaccgccgggctacgcggacaaaagccggcggaaggctataacatccagcagatgctggagatcctcacggcgcagaatgtgccggtaaaactctgcaagacctgtacggacggacgagggataacccatttagcattaatagatggcgtggaagtgggaacgctggtcgagctggcgcagtggacgctggcggcggataaagtgctgaccttctgaattaatcgcctttaacaggattaaatgtcaggctggtggctattgctgatgcaaaagtacgccagctgaacgctttcaggaagattgtcatttttgtttaatcgttatccattttgttgatcgaaatcatcatcgatacgctccccctttggtgttatgcaacgagcaaagtgtgaacaatatcacgcgcgggatgatgtattcagagacagaaacggggtatgaaaatggcaatggtaaaagcaagtttgacgttatttggcggtgatacgctggtggtgcgctgttcggagcgctgtcatattcacttaatgagcgccaaggccgccggagacagccacgccgatatttttagcgttcaggacagggacagcgcttatctcaccgtgccctacagcggcacctggaacgtgctgatcgacagccatagtcagtccctcgagcactccattagctacgttcccgcctgaatctccacgcccggtagaccgggcgttttatgcgagcccgggttggctcgcctcgccgaccagatgtcgcacctggataatcagatcgtcaagactggcgtcgcgcatgccaagcttgcgtaattcctgatccaacgaaaagagatactgggcattggtgccgagcggcccgctggcgcgggctatcagcggcgcgatggtttgtgcgctggtatcagattcatacagtgggtggcgcggatccataataaacaccagcgcattcaccgtacgcccatcgtccagctcaagacggcaccaggttggcaaatagcagccagtgatcatttctcgcttccacagaagcgtcagctcttgctccagcgtctcatccggcagacgataggccacgccggtggtacgcccgccttccttcaatgccagcatcctgcccggctgatgcgcgctgccgcgaccggcggtcaggcgcaggcaaaacgcgcgatgccaacccggcagcgtaccggtgcaggattcgctgtattccagcgccgggttccacatcaatgaaccgtagccgaaaatccacaccgaaccgttgtccggacgacaggccagggtcgctgccaacgaggccgcccgttgctccgccgaccacagcagcgattcctcaatcgcgccaaacgccgtcttacaatccgcattaattaagaaatcacgagttaacacgttctactacctccgccactgcctgcttcccggcgataatctgtgccatccgtgaatattgctgaattattatccagctttattactcaataagcaattaacggagcgttgacaagggggctgacaaaaaattagatcgcaaaagtgattactttttcttatgccatttgtcgtcatcgcctttttgataatcatttttcaccgccgcccaggcgactttatgcgccgtctcctcacggctggcatcatcgcgacggtcagctttatctttatattgatcccacgcgctattgaaagcttctttatatatttcctgcgcgtgttccggcaggacgtgctgaacgctatcgggaagttcttgtttactacggtaaggcataatgacctccagaatcagggtaaaagctaagtctggaacacaattcccgggttggcaaatgacaggaatattgagaaatgaattttagtaatcatctgaaaaatatgtataaaacatacgtaacagcattttttagcagaccaacgcatttcttatgcaagagtggtaaatttaagtaaaaatacaaattaaacctatcaatgtctgttattttatcaacttacgttatctataattataacacctgcataaatggagatggttcatgacacatgcacatgaggcggttaagacccgccacaaggagacctccctcgtttttccggttttagcactggtggtgctgtttctctggggaagcagtcaatcactaccagtggtcgttgcgattaatattctggcgctggtcgggattctgagtagcgcatttagcgtggttcgccatgccgacgttcttgctcaccgcctcggcgagccttatggttcattaattttgagcctgtcagtggtcattcttgaagtgagcctcatttccgcattaatggcgaccggcgacgccgcgccaacgctaatgcgcgatacgttatattcaatcattatgatcgtcaccggcggtctggtcggcttctctttactgctgggcgggcgtaaattcgccacgcagtatatgaatttgtttggcatcaagcagtatctgatcgccctcttcccgctggcgattatcgtgctggtattcccgatggcgttaccgggcgccaacttcagcaccggccaggcgctactggtggcgctgatttccgccgccatgtacggcgtattcctgctcattcagaccaaaacgcaccagagcctgtttgtgtacgagcatgaagatgacagcgacgatgacgacccgcatcacggtaagccctcggcgcatagcagcggctggcacacggcctggttactggtacacctggttgcggttatcgccgttaccaaaatgaacgctaatccgctggaaacgctgttgaccagcatgaacgcgccggtggcctttaccggtttcctggtggcgctattgattctctcgccagaaggactcggcgccttgaaagcggtgctgaacaaccaggtacagcgcgcgatgaatttgttcttcggttcggtgctggcgacgatttccctgacggtgcctgtcgtcacgcttatcgccttccttaccggcaatgaactccgcttcggcttgggagcgccggaaatggtggtgatggtggcgtcgctggttctgtgccatatttcgttctcaaccgggcgcaccaatgtccttaacggcgcggcgcatctggcgctgttcgccgcctacctgatgacgatatttgcctgagcgggtaatcagtaataaagcccaaaaaaaagcctgtcggtggcgaaaccggcaggcttttttacagctcagcgaaacttagttgctggtatccagctcgtcgaagcttttcaccagatcgtcgatcgctttcatttgcttcaggaacggttccagtttagccagcggcagcgcggacgggccgtcacatttcgcgtgatccggatccgggtgcgcttcaatgaacagaccggcgatacccaccgccatcccggcgcgagccagttccgtcacctgagcgcggcgaccgcctgaagcagcgccaaacgggtcgcggcactgcagggcgtgggtcacgtcaaagatgaccggcgagttgttggacgctttcttcattacgccgaagccgagcatatcgacgaccaggttgtcgtagccgaaattagcgccgcgatcgcacaggatcactttgtcgttcccgccttcaataaatttatcaacgatgttgcccatctggcccgggctgacgaattgcggtttcttgacgttgatgacagcgccggttttagccatcgcttccaccaggtcagtctgacgcgcgaggaacgctggcagttggatcacgtcaaccacgtcggccaccggctgcgcctggctggcttcgtggacgtcggtgatgattttcacgccgaaggtctgcttcagctcctggaaaatcttcatcccttcttccagacccggcccacgataggagtggatggaagaacggttggctttatcaaaagaggctttgaacacatacggaatgcccagcttttgcgtgacggttacataatgttcgcagatacgcatcgcaagatcgcgggactccagcacgttcattccgccaaacagcacgaacggcaggtcgtttgctacgttgatatcaccaatgctaaccactttttgtttcataagatcgccttatcagggtgtaaccggaatggttccagactaatgcaatgtaatttgtttatgtgaaatcgtgttgatctgcgcacggatcatctcgctaatcggatcctccggacactgctcaacgaaataattgagatccagcagcgccacgtgatcgcactccagttgggcatagataagcccgcggtcgcgaatttcatacgggtcctctggattaaactgcagcagcgcttcgctggcgcgtagggccaactccatttgccgctcttccatcaacgctgatttcagcgtatcgagcagtttgcggatcacttcggcgttatcggcctcatcgagatcttcattgaacagttccgccaccgggctgatatttcccttaagccacacctcaagcgtgtgttcatcaagcgtctcgccgttgaatgggttaatcaaccacatctcttcgctggcgtccgggtcggcgcgcagcagcatctgtgtggggaaaataaccggcactaccggtaaatccagacgctgggcaatccatagcagaatcgcccccagcgacaccgcgctcccctggcgattcaccagcactttatccagccatagcgcatcggacagacgatagatgccctgcgaggcgccgaagccccactcgtgatagaacaattccagcaaccggtcgagctgacgctcctgatcccaggaggtggcaatctcttcctgcgccagtgttaacaaccgctgcagctcatcctgcacaaagtgcgtcggaaagtcgtcgcggatcaattcagaaatgaggaccatgccttcgcataatggcgctttgttaaattcgaaatcagctaatgacctcatgccttaccccagtaacggtattcttgtgatggcgagttgaacaatgaagaacaacaccaccagcgccagcagaaaggcgatgaaccgggtctgctggcggcgcgggcgacgtcggcccaacgcaataaatcctaatgcgatgtaaatgataacgccaaacagcttttcagtcagccatgcgccatcttcggtaaacggcagatagtgcgttatcgccattaatcccgcgccgctgagaaacagcagcgtatcgctacaatgtggcgcaatacgtacccagcgctgattcagcatcgcgctgccgctgtaggtccaccagtaacgcagcacgaaaagcccgacggatgtcaccacgcaggcaatatgcaaatagagtactgcagtaaataaattcattcgccggcttgctccttgtgcggccaacgcccgagagtcagacgttcgttatcgccataatcacggcaggtctcgacatcgcgataacctgcttcattaaacaatgcgcgtaccgcctcgccctgcttccagccatgctccagtagcatataagcgttgggtagcaagtactgacgcccttcacggatgatatgcgctaaatcggccagcccctggtcggcggcgaccaatgccgttttcggctcaaagcggacatcgccctcggcaagatgcggatcggtttcatcgatataagggggattactgacaatcatcgcgaagcgctgccctttgagcgcactaaaccagtcgctctgcaggacggtcacattgttgatagcgagatgggcggcattgcgcgcggcaagcgccgcggcgtcaggcataaaatcaacggcagtgacctggcagtccgcccgctcgctggccagcgccagagcgatagcgccggtgccggtgccaagatccaggatgcggcaggccgtctgcggcaagcgtaccagcgcctgctcgaccaggcattcggtgtcgggccgcgggatcagcgtcgccggcgagacaaacagcggcagcgaccagaactcgcgctgaccaaccagatgtgccaccggctcgccgttggcgcggcgcgccagcaaagcctcaagttccggcaactgttccgccgtcaatacggtttcgtcaaaagcgaggatccaggtccgcgctttgccggtgacgtgccccagtaagatctcggcgtcgcgacgcgggctttcgctcgcgccgagccgggctatcgcctgagtgagccactgtcggaaggtcatcattcctgctcggaaagcgccgccagctggtcagcctggaattcctgcacaatcggttcgatcagcatatccagtttgccttccatggtttcatccagacggtaaagagtcaggttgatacggtggtcggtcacgcgcccctgcgggaagttgtaggtccggttgcggtcgctgcggtcgccgctgcccagcaggttacggcgggtagacgcttccgcctgctgacgcttggcgacttcggcggcgcgaatacgcgcgcccagcaccgacagcgccttggctttgtttttatgctgtgaacgctcgtcctgacattcaacgacgataccggtcggcaagtgggtaatacggatagcggagtcggtggtgttgacgtgctggccgcccgcgcctgaggaacggaaggtatcaatacgcaggtccgccgggttgatatccggcatttcggcttccggcagctccggcatcaccgccacagtacaggcggaggtgtggatacgcccctgggattcggtcgccggcacgcgctggacgcgatggccgccggattcaaatttcagccgcccatagacgccatcgccgctgatcttggcaatcacttctttaaatccgccatgttcgccttcgttggcgctcatgatttcgacccgccagcggcgggcttcggcgtagcgggtgtacatacggaagagatcgccggcgaacagcgccgcttcatcgccgccggtgccggcgcgaacttcgacaaaagcgttgcgctcatcgtccggatctttcggcagcaacagtacctgcaactgctgttccagcgcttcgcttttttctttggcatcgcgcaactcttcctgcgccatttcgcgcatttccggatcgtcgagcatcatctgcgcggtttcgatatcgtcctgcacctggcgccagtcggtatagcagcgggcaacatcgccgagctgcgcatattcgcgcgacagcgcgcggaaacggtcctggtcggcaatggtggcggcgtcgccaagcagcgcctgaacttcttcatggcgttcgtacagagcttccagtttagcaacaatagaaggcttcataggcgtgaattcaccctgtctttaaatagagaaatgtgcgctattccagcccgaggctgttgcgcagaatatgcaggcgttcatcatccccgtcacgggcagcctgctgaagagatttggttggagcgtggatcaggcggttggtcagcttacgggccagatcttgcatgatttcctgcgcatcgccgccctgctccagagcggcaagcgctttcgccgtcagctcctcgcgaacctgctcggattgggaacgatattcgcggatagtctcgctggcgctttgggctcgtagccaggccataaattcgctggtttcctgctcgacgatcgattccgcctgcaccgccgcggccttacgctgcgccagattgtgctgaatgatattttgcagatcatcaacgctgtacagataggcgttggccagcttgccgacttccggctcgacgtcgcggggcaccgcgatatccaccagcagcatcggctgattgcggcgcgccttcagcgcgcgctcgaccatccctttgccgataatcggcagcgggctggcggtagaactgataataatatcggcgtcttttaaacgctcgtcgatatcgctgagggcgataacttccgcgccgacttcatccgccagcgcctgggcgcgttcacgggtgcggttggcaatcaccattttgcgaacgttatgttcgcgcagatggcgggcgaccagttcgatagtttcccccgcgccaaccagtaacaccgtgacgctggagagcgattcaaaaatttgtcgcgccagcgtacaggcggcgaaggcaacggaaacggcgctggcgccgatatcggtttcggtccgtacgcgtttagccaccgaaaacgatttctggaacatacgctccagttcgctgacgttcagatggccacggctggaatccgcaaacgcttttttcacctgcccgaggatttgcggctcgccaagcacgagtgaatccaggccgctggcgacgcgcatcagatggctgacggcgtcgttatcctgatgccaataaagacttttacgtaggtcttcttcattaaggccgtggaagtcgcatagccagcggatcagcgcttcctgcaggttgtcctgctcttcaacgctgagatacagttccgtgcgattacaggttgatagcaccaccccgccctgcaccatcggctgagccagcaagctctccagcgccttgtcgagcgtatccggcgaaaacgttacgcgttctcgcagcgctaccggagctgttttgtggttgatgccaagagctaaaagggtcatggtgagggaatagtaccagcgttgctaaggttagtctgagcgcatcatacaggatgcgcgtactcaataaaagagacgccccccttttggagtaatagtcagggcttaatagccactaacggtaattttttgatttcagacaacttgaacgtagacgctatcggccagcgacgctagcattaagggttattattgcaacccgctacacaaatcggtgtgcgaaccatcagtcgccgcatttcactgtagacatcaaggatttgtcatcattatgaatcgactgttccgcctgctgccgttggcaagcctcgttctgaccgcctgtgcaatcaatactccgccgcaagggcccggcaaaagcccggattccccgcagtggcgccagcaccagcaggatgtccgcaaccttaaccagttccagacccgcggggcgtttgcctatctgtccgatgagcagaaagtgtatgcccgtttcttctggcaacaaaccggccaggaccgctaccgcctgctgctgaccaacccgcttggcagcaccgaactgtcattaaccgcgcagccgggcagtgtccaattgattgacaacaaaggccagacctacaacgccaccgatgccgaagagatgattggccgcctgaccggcatgccgatcccgcttaacagcctgcgtcagtggattatcggcctgccgggcgatgccaccgactattcgctggatgaccagtaccgcctgcgcgaactcaactacacgcagaatggcaaaacctggcacgtgacctacagcggctacaccagcgacaccaaaccaaccctgccgtctaatatggaactcaacaacggcagccagcgcatcaagctgaaaatggataactggattgtgaaatgatgagtcgctggcccgctcctgcaaaattgaatctgtttttgtatatcaccggtcaacgcgccgatggttatcacacgctgcagacgctgtttcagtttctcgactatggcgacacgctgaccattgaaccgcgccgcgacgggaaactgcggttgttaacgccagtcgccggcgtgccggatgaagagaacctgattattcgcgccgccaggctgttgatggcggcggcggagtctcatggacagttgccgcccggcagcggcgcggatatcagcatcgacaaacgcctgccgatgggcggcggcttaggcggcggctcttctaacgccgcgacggtgctggtagccctcaatcatctgtggggctgtgggcttagcgaagaccaactggcgacgcttgggctacagctcggcgccgatgtcccggtctttgtccgcggccacgcggcgtttgccgaaggggttggcgagattctcaccccggttgatccgccggaaaaatggtatctggtcgcccatccgggcgtgagtatcccgacgccgatcatttttcgcgatccggagttaccacgaaataccccgagcaggtcaattaataccttactaaactgtgaattcggcaacgattgcgaggttatcgcaagaaaacgttttcgtgaggttgatgcaacgctttcctggctgttagaatacgcgccgtcgcgcctgactggcacaggagcctgtgtctttgctgaatttgacaccgaatccgccgctcgtcaggtgctggaaaaagccccggaatggctgcaaggctttgttgcgcgaggaattaatgtctcgccgctgaagcaagccctactgaagtaattctgctttttgcatgaataacggcaagtttgccgggcaaacagagtatcggtgacaacgtcaccctgttccagacgttgcatcgtgctctttaatacaccgcctggatgagatggcgccggcccgcacagtttaatggcccgtttcatccaccactggacgcatgcctgaggttcttctcgtgcctgatatgaagctttttgctggtaacgccaccccggaactagcacaacgtattgccaaccgcctgtacacttctcttggcgacgccgctgtaggtcgttttagcgacggcgaagtcagcgtacaaatcaacgaaaacgtacgcggtggtgatattttcatcatccagtccacttgtgctcccaccaatgacaacctgatggaattggttgttatggttgatgccctgcgtcgcgcttctgcaggccgtatcaccgctgttatcccttacttcggctatgcccgccaggaccgtcgcgtacgttccgctcgtgtgccaatcaccgctaaagtcgtcgctgacttcctgtccagtgtcggcgttgaccgcgtactgaccgttgacctgcacgctgaacagattcagggcttctttgatgttccggttgataacgtattcggtagcccaattctgctcgaagatatgctgcagctgaatctggacaacccgatcgtggtttctccggacatcggcggcgtggttcgcgctcgcgctatcgcgaagctgctgaacgataccgacatggcaatcatcgataaacgccgcccgcgcgctaacgtttctcaggtgatgcatatcatcggcgacgtcgctggccgtgactgcgtgatggttgatgacatgatcgataccggcggcaccctgtgtaaagccgcagaagcgctgaaagagcgcggtgcgaaacgtgtcttcgcctacgcgactcacccgatcttctccggcaatgctatccagaacattaaaaactctgtgattgatgaattcgtcgtctgcgataccattccgctgacgccggaaatcaaagcgctggataaagtccgcacactgaccctgtcaggtatgctggccgaagcgattcgtcgtatcagcaacgaagaatccatttccgctatgttcgagcactaatcgagcccagccgaaaaacccgctgcggcgggtttttttgtctctggttcatatttgtatgactaatgcctccttcacctgccattcagttgacagatgatgcgctcatggatgaaacattattgtgaatagattattttcctcacatgtgatgcctttccgcgccctcatcgacgcttgctggaaagaaaagtacaccgcatcgcgctttacccgcgatctcatcgccgggataaccgtcgggatcatcgctatcccgctggcgatggcgttagcaattggcagcggcgtagcgcctcaatatggactctacacctcggcggtagcggggattgtcatcgccctgaccggcggttcgcgctttagcgtttccggccccaccgcggccttcgtggtgattctctatccggtgtcacaacagtttggcctggcaggcctgctggtcgcgacgctaatgtcgggtatcttcttaatccttttcggcctcgcccgctttggccgcctgattgaatatatcccgctttcagtcactcttggctttacctccggtatcggcatcactatcggtaccatgcaaattaaagactttcttggtctgcagatggcgcatgtcccagagcactatctgcagaaagtcggcgcgctggtgatggcgctgccgacaattaacgttggcgatgccgccatcggtatcgtgacgctgggtattctgattttctggccgcgtttgggcatccgcctgccggggcatctgccggcgctgctggcgggctgtgcagtaatgggcatcgtcaatttgctcggcggacatgtggcgaccatcggctcgcagttccactatgtactcgccgacggcagccagggcaacggtatcccgcagctgctgccacagctggtgttgccgtgggatatgccaggctcggagttcaccctgagctggtcgtcgctgcgcgcgctactgcctgccgccttctctatggcgatgctgggcgccattgaatcactgctctgcgcggtggtgctcgacggtatgaccggcaccaaacacaaagctaacagcgagctggtcggccagggcctgggcaatatcatcgcgccgttctttggcggcattaccgccaccgcggcgattgcccgctccgcggctaacgtgcgcgccggcgcgacctcgccaatttccgcggtgatccatgccctgctggtgatactcgcgctgttaatcctcgccccgctgctctcgtggctaccgctgtcggccatggccgccctgctgctgatggtagcgtggaacatgagcgaggcgcataaggtgattaacctgctacgtcacgggccaaaagatgacatcgttgtgctgttgatgtgcatgtcgctgaccgtgctgttcgatatggtcatcgccattagcgtcggtatcgtgctggcttcgctgctgtttatgcgccgcatcgcgcgcatgacgcgactggcgccggtcaacgttgaagtgccggacgatgttctggtgctacgggttatcggcccgctgttcttcgccgcggcggaagggttatttaccgatctggaaagccggattgaaggcaaacgcgtggtggtgctgaagtgggatgcggtgccggtgctggatgccggtggtcttgacgctttcctgcgctttgtgaagcgcctgccggatggctgcgagctacgggtgtctaaccttgaattccagccgctgcgtactttggcgcgcgcaggggtccagccgattccgggacgcctgagcttctaccctgaccgtaccgcggcgctggcggacattgaattagcgcaataaaagagagctcgccggaaaacatatccggcgagctgaattcagttagctgtgacgatgctggtcgcgacggcagcgtttatcgtagtggcgaacccaccaatagcggtcggagactctttcatgaccgccaacgcgagcgcccgccagccacaaaacggcaccgacgaaaatactcaacaccgcgccatgagcaaagaattgcggcaggttaaactgtggaagctggtttaaaatagagtaaccaacgccgaccaccatcacaaccaaccctaaacccatcagtatgttaccgagtaacgaagcgtttctgcgtttcatatgtcacctccggaccttgggctacatgggaatatccccaaaatttataggttaagtatagacaatagggatatgagtgattgcgtgagtgatcacattcgggaacatctgatcaacaaaagtttacaaataagccactgaacaacatcaaattctaatggttcaaagtggaaattatcagcaatggtagcgtttcgctggcagaattttgtcaagcgccgacgcaggcagtacactacgcggcaaagtacgcctatgcaggaataaaaagtgacgataaaactgattgtcggcctggctaaccccggcgcggaatacgcggcaacgcgccataacgctggcgcctggtacgtagatttactggcggagcgccaccgcgcgccgctgcgagaagagagcaaattcttcggctatacctcgcgcctcaacctggcgggggaagacgtgcgcctgctggtgccgaccacctttatgaatctcagcggcaaagccgtggccgcgatggccaccttttaccgtatcaatccggacgaaattctggttgcccacgacgagctcgatttaccccccggcgtcgctaaatttaaacttggcggcgggcacggcggtcataatggcctgaaggacattatcagcaagctgggtaataacccaaactttcaccgcttacgcgtcggaattggccatccgggcgataaaaacaaagttgtcggctttgtgctgggtaaaccaccggccagcgaacagaagctaattgacgaagcggttgatgaagcggcgcgctgtaccgaggtgtggctgaaagacggtttaaccaaagcaaccaaccgtttacacgcctttaaagcgcaataagcgtccgacgtgcggaatttttgccgcacaccgtgtataataggcaaagctatttacttttctacagtctgttattcataacagactgattatccaaagattaaggtgatttaaatcatgggattcaaatgcggtatcgtcggtttgcccaacgtcggcaaatccaccctgttcaatgcgctcaccaaagcaggtattgaagcggccaacttcccgttctgtaccattgagccgaacaccggtgtcgtgccgatgcccgatccgcgtctggacaaactggctgagatcgtcaagccgcagcgtatcctaccgacgaccatggaattcgttgatattgccggtctggttaaaggcgcgtccaaaggcgaaggtctgggtaaccagttcctgaccaatattcgtgaaaccgaagccatcggccacgtagtgcgttgctttgaaaatgacaacattatccacgtcgcgggtaaagtcgatccggcggaagatattgacgttatcaacaccgagctggcgctgtccgacctcgacacctgcgaacgcgccattcaccgcgtgtccaagaaggccaaaggcggcgataaagacgcgaaggttgaactggccgcgctggaaaaatgcctgccgcagctggaaaaagcgggcatgctgcgcgcgctggatctgagcaaagaagagaaagaagcgatccgctatctgagcttcctgaccctgaagccgaccatgtacatcgccaacgttaacgaagacggttttgaaaacaacccatacctcgaccaggttcgcgctatcgctgagcaagaaggttccgtggtggttccggtttgcgccgccgttgaatccgacattgccgagctggacgacgaagagcgtgacgagttcatggccgagttgggccttgaagagccgggcctgaaccgcgtgatccgcgcaggctacgctctgctgaacctgcagacctacttcaccgccggcgtgaaagaagttcgcgcatggactattccggttggcgcgaccgcgccgcaggctgccggtaaaatccacaccgatttcgaaaaaggctttatccgcgcccagaccatcgcctatgaagacttcattgcttacaaaggtgaacaaggcgcgaaagaagccggtaaaatgcgtgcggaaggcaaagactacatcgttaaagatggcgacgtaatgaacttcttgttcaacgtctaatcactgccgataaaatccgcgccccggcgcggatttttcatttcaaagcctcgcaggttttataactcgcgaggctttaaattatctgaatggcgcatctaacggaatttctgcgtcaggctcatgggtaattcggttacgcagatcgcgacgaatcatttcaattgcccagaaccaaaaaatatggccaagcagctcggaaatatattcatcagccggaatgtttaataacgacggtgtgagacctaatagcggaaatgaaatccagtgtaccgcaatggtggcgacaatcccggcccacacgccctgccataatttaacttttgggaatatctccgcaaccacgcaatagccaatcgcgaacaccagcgaaaagatgatatgcgtaaccattaccggattgatgatatgttcagagaaggtgtagacggtatgtgttgggtcaataccaagatagtcacgtaaaaaaagataaggaggattgaattcgtcacgcccaccggaaaatgtccgcggcggcagaggcacttccgccccccacttaacgaatgccgacataattccggcaataaccccaaccaataaggcgacgccatagcgacgccgaccaggtgcagtttgtacaaaaaattccttaattgccataaatccctcgccatgaataatattgttacagcattgcaatattctttaagtctgcgcgggtatggcttgatcaagatcacactttttgttcaaaagataaacaaaactaatatttttatatcatcacggagcatcaattaatgccccgcgaggcactcttttaatcacgccaacccattgccggcgcaacatgcttcagaatagactcaatcacgtgagcgttataatccacgcccagctgattcggcacggtcagcaataaggtatcggcttccgcgatcgcttcatcctgtttcagttgctcgacgagcttatcgggttcagcggcatagctgcggccgaaaatggcgcgggttttctcatcaagaaaaccaatactgtcgctgttatcccggctggagccgaaatacattcggtcgcgatcgtccatcagggcaaaaatacttcggctgaccgatacccgcggcgtgcgcgtgtgccccgcctccgtccaggcctgacgataggcgcggatctgtttcgcctgttggatatgaaatggttcgcccgtctcatcatctttcagcgtcgagctttgcaagttcatgccgagcttcgccgcccacatcgccgtagcattagagccagcgccccaccagatacgctcacgtagtccggcggagtacggctcaagacgcaacaatcccggcgggttgggaaacatcggttgcgggttaggtttagcgaaaccttcgccgcgcagcatgtccagcagcacctcagtatggcgccgcgccatgtcagcgtcggactcgccatcctgcggttgaaaaccgaaatggcgccagccatcaatcacctgttccggcgaaccccggctgatgccaagctgtaaacgcccaccggctatcaaatctgcagcgccagcatcctccgccatatatagcgggttttcgtagcgcatgtcgataacgccggtgccaatctcaatctttttagttttcgcgccgatagcggccagcagcgggaacggtgaactgagctggcgggcgaaatggtgcacccgaaaataggcaccgtccgcgcctagctcttcggcggcaacggccagatcgatggattgtaagagcgtgtcggcagcggaacgggtcgccgactgcgacgatggcgtccagtggccaaatgacaaaaatccaatctttttcatgaggatagcccctgatttcggcaaaacattcagcagacgcggagataacgttccgcgtctgcttgtggttctcctactctaccccttagccaaaatgtataaatggcgtttatttaacagaatagttcaaataaattgaccaaatataacgagagttatttctgcatcagcgcaaaaacgccccaaccgaaatattcccgggtataagtgacatggcgaagcggtgcggcattgagctccgcacggacctcaaccgcaaattcatcatccggatgcgcctgcagccaacggcgcatcgtcagccatttagcagcttcataacggtcccacccctcgcggtcagccagcaccatctcaacgatgtcatagcccagttcgccaaaagaggcgaccagcgctggaagcggcaacaaatcagccaccgcagaaacaccgcaggcgcgcgcctcttcttctgtagcgggtaccttacgccaccagggttccccgataagtagcataccgcctggcttaaggcttagggctaactgcgccacggtgccggcgacgccgccggcgatccacgtcgcgccgatacaggccgccacatcgtattgccgttcggcaacgtaacctgccgcatcgctatggagaaaagtgacgcgatcgctaacgccaagtgctgcggcgcgttgtttagcctgcgcggtaaacaatgggctcatatcaatgcccagaccgccgatagcatggtcccgcgcccaggtgcagagcatttcgccagaaccgctgccaaggtcgaggatctgcgcccccgcctgcaggcgaagtacgcggccaagcgtggcatatttttccgccgtgaaggggttatggatacgatgttcactttcgctgatagtaaagatacgtgggatatcgatagttgtggtcatgtcactctccttagcgattatccggttgagcacgaacgttattcagcccgctggtgttgatgcgatatggctggccgttaacggatttaatcagttttttagtgcggagctttttgaaaacggcgagcgtacagtcgctgagcagtagcccttcccggctatagcactccacggcgatgacgcggcctgaggtatcgcgaacgtgcgcaatacgtccgcctttcgcgagaacgtgtaaggtacgttgttcctgacgggataaattcatactggaaaacctgtttaatcatcatgtgcaaaacgtgcaaacacacagcggtgcccgcattcgatttcggcgcagtgataaccagcccggcctgaaaggtcggcaaactgattatcagatgattacattctccagcatcaaagcctcggtagagttgaaaggtatttaccggctgaatgataacatccagtgacagaaaggatatttataaacggggaaattgtgatcggtgtctgaaattgcgccccctgccccatgacggaaggcgcacaatgaatagcatcagcgcattgctcctgattaccacatcaaatcatcaggtactttaaagtcagcatacggatcgtcttcgtcctcggcttcctggctcagggcgctgttcaacacaatactctcggcgtcgcgctgggcgattttatccgccacgctggcgggaataatcgcgtattcatatttaccgttattatcaacagcaaggcgggcaatcgccagacggccgctaatgagctgcgcctgggtggttttatccacatcaatgtttttgatgagattattatccgtaaagttaaaagcgatctggcctttcgcaatcgtgattcggttcatttcgatcagttgcttaacctgtgctttatactcttttgctaaagccgcttgcttttgctgctcgctgagctgtttgtcgcgctcaagctgggcttttttgttttcttcaacggcctcgcgggcttcacgcgcctgaacacgtgactttttcgccgttctctgaaccttagccatctttttactggtgaccagacccgctttcagcatctgctcttgtaaggtaagttttgtcatcgtcgtttctacagtcgtttgaattatgatttggatacggaaaatcagggtcagactttaaggagcttcaccgtggcgtcgatgtcgatttcatcttcagagaatatgagcgtggtgccctgaaaggtagtgatcgccagctttttcagcgtacgcatttcgcccggcttcacgctcgctttcggcttgatactgttcatcaataacccgactgagagcaccgcattttccttgtcgatacgcgtatcggccggcacttcctcactgtagaccaggtatgatttaatcgatgtcagcttcaggcgctcaccggcaatatacagatgtttgctttccgggatgaccttcaccgcgtaagccgaaagacctttattattggtcgtaggttcaaacgtaaccgccgcatctttcttaatcagatccggattggcgaccttaatcacatgaaaatagcggttatcaccattttcatctttgataaatccgaaacctttatctttaaaccacgttgtgatcgtaccgttcatcgccattaccgcctgattaatcgtttatctactcaattttgcagcgcgcagtttaaagcacaatgccagcgtagaccatgcctttgctctaagtgttgcccgatatcgacaattgttcctggcttttgccgaaaatttgtttcattaatgggtaaggttcaatcaggagaatgcatgatgtctaactattcctccgtcgcgttgataggtcctggcgctatcggcacgaccattgcggccgtgctacatgaagtcggccgcaaaccagtgctctgcgggcgcaccgcgcatcagcggttgattttacgccgggatgacggcgaagtgatcattccagggccggtattgaccgatccacatacgcttgaacgcccgtttgagctgctgtttgtggcggtgaaaaccacccaggtaacggattgcgcacactggcttaaggcgctgtgcgacgaaaacacggtggtctgcgctttgcagaacggcgttgaacaggaaagcctgcttaaaccctatgttaacggcgcaaaagtattaccttcggtcgtttggtttccggcgcaacgtgaggcggatgcttcggtatggttacgcgccaaaccgcgcctgacgctacccgatacgacgcaagggcagaaaatagccgaggttctcgacggtacccgctgtgcggttgagttgacggctgatttcacatcggtcgcctggcggaaactgctgcaaaatgccgtcgcgggcctgatggtgctggtgaatcgccgcgccggaatgttttcgcgccaggacatcaccgggctggcgttggcctatctgcacgagtgcctggcggtggcacgcgccgccggagcggtactcgccgatagcgtgccgcaggaaattgttgatgggtttcatcaggcgccggcggatttaagcacctcgatacttgtcgaccgtcaggccaatcgtccgctggaatgggacatccgcaacggagtcatacagcgctatggccgaacgctaggcgttgccacccccatcagcgatgtcgtcgtgccgctgctggcggccgcaagcgaggggcctggctaagattgcttcaaaaaaattaccgtatttgttatagtgttactcactgattatttatctctgcggtgccaaaaagaacaagattcaccgcaacccaggacaagaaaatgttagattaccgcttcccgacagctttgcagatggttctcagcgtagcgatggcggagcaattgggtgaacgttcgacgagtgcggttctggcctacggcctggaagccaatccgagctttatccgtaaactcatggttccgctcacccgcgacggcatcatcgtctccacgcttggccgcaacggctctattcatcttggccgccctgccgaccaaatcacgctgcgtgatatctatctttccgttactgaagataaaaaactgtgggcgtctcgccctgatgtcccggctcgctgcgtgatcagcgccaacgcctgctggtactttaagtccgtagccgatgaagccgagcaggcgtcgctcgcggtgttagctcgccataccgtggcaagcgccctggaagaggtcaaaaaagccgataccagcggctgcgatccgctgcctgagctgacagcccgctataaagaagcgcattaacttttcttgttgcgaaaaaaaaccgccttaacgaaaaaggcggttttttgttattagcagcgacctactcaggcaagacgtcctttaccggtttgccgcgcgtcaccagttttcgcagcgtcacataaaacaccggcgtcaggaacagcccaaacagcgtcacgccaagcataccggagaacaccgtgatcccggtgacgccgcgaacttcagcccccgcgccgtgaccaagaatcagcggtatcgtcccggcaataaaggcaatcgaggtcatgattatcgggcgtaaacgcaggcgacaggcttccagcgcagcttccatgatccctttaccctgaatttccagttcgcgggcaaactcgacaatcagaatcgcgtttttacacgccagccccatcagcaccaccagccccacctgcacaaatacgttattgtcgccgccggtgagccagacgccaaacagcgcggagagcatggtcatcggaacaatcaggatcaccgccagcggtagcgtccagctttcatatagcgccgccagcaccaggaacgccaacagtaccgcgaccgggaagacgatcagcgccgtattgccctgcgtggcctgctggaagctgagatccgtccactcaatattcatcccattcggcagtatttgcttagacatgcccgccagctgcgtcatcgcctgcgtggacgagagcacgcggggatcggcatcgccaatcaaatccgccgccggataaccattgtagcggatcaccggatccgggccgtaggtagtattaatattcaccatactgccaatcggtaccatttcgccctgattattgcgggtgcgtaaattagcaatatcttccacgctgtcgcggaacggcccatcagcctgcgccattacgcgccaggtacgcccaaactggttaaagtcattcacatacgatgaccccagataagtttgcagcgtaccgaaaaggtcggtcaacgacacgccctgcgctttcgctttatcacgatcgacctgcacatccagttgcggcacgttcgcctggtaggtcgagatagggaaatgcatgcccggcgtctgcataatcgagcccgacatcgcgttcactgcgttttgcaacgcgccataacccagaccggcacgatcctgaatatacagggaatagccggaaccctgacccagccctaaaatcggcggcgggagaatcgagaaaccaaaaccctgctgaatttgcgcgattttggcgttaatctcggcgttaatttccgcagcggtgtgttttcgctgatcgaacggtttcagaccaaaaaagaccgtcccggtattcggcgtattggtgaactgcagcgcattaagccccggaaaagccaccgcataatccacgccttcggtattcataccaatttcgctcattttgcggatcacggcgtcggtgcgcgccagtgaagagccttcgggcattttcacgccgccaattaaatacagtttatcctgcgttggaataaacccgccgggtacgactttaaacatcacgccagcggcgcagagcagcaggacgtagaccacaaacaccgcgccgcgtcgcccgagcgttttgcctaccagcccctgatagccgtttgagctacgatggaaaaaacggttaaacggacggaaaatccagccgaacaagcgatcgataagccgggtcgggaagtctttcgccgcgccgtgcggttttaacagcagcgcagccagcgctggcgagagcgtcagggagttgatggcggagatcaccgtcgatatcgcaatcgtcaccgcaaactgcttataaaactgccccgttaccccggagaggaacgccatcggcacaaacaccgcgcacaacaccagcgcgatagcgataatcggcccggagacttcgcgcatcgcctgatgcgccgccgctagcggagccagcccctcttcgatgtttcgttcgacgttttccaccaccacgatggcatcatccacgacaataccaatcgccagtaccagcccgaacagactcagggtattcagcgaaaagcccagcagataaagaatgctgaaggtacccaccaccgataccggcaccgcgatcagcggaataatcgacgcgcgccacgtctgcaggaacaaaatcaccaccagcaccaccaacaccaccgcttccaacagcgtttgcaccaccgcgcgaatcgaatcgcgcacaaacacggtcggatcgtacggcgccgcccatttcatatcttccgggaaacgggtggatagttcgttcattttggcgcgtacggcgttagacaaatcgatagcattcgcccccggtgactggaaaataccaatcccgaccgcgtctttattgttaagctgggaacgtagcgcatagctacccgagcccatttcgatacgcgccacgtcacgcaggcgcaccagcgaaccgtcttgcgccgttttcagaataatattgccaaactcttcttccgtatgcagacgcccctgggcgttaatagagatcaaaaaatcgctctctttcggcagcggctcggcgcccagctgtccggcggaaacctgaacgttttgctcctgcatcgccgtcaccacatccgatgcggttaacccgcgcgccgcaaccttattgggatccagccagatgcgcatcgcatattcacccgagccaaaaatctggatctgcccgacgccaggcagacgcgcgagttcatctttgactttcaacgtggcgtagttacgcatatacagtgaatcgtacttaccgccgggtgaaaacagatgcacaaccagcgtcagcgttggcgattgcttctgggtggtgatgcctaaacgccgcacatcttcggggagtcgcgcctcagcctgcgagacccggttttgcacctgaacctgcgcctgatcggggtcggttcccggacggaaagtgacggtagttaccagtacgccgtcagagcctgcgacggacttcatgtacatcatattttcgacgccgttgatggcttcttccagcggcgtcgccacggtctcggcgatcactttcgggttagcgccggggtactccgcccgcacctgcacgctgggcggtacgacatcaggatattcgctgaccggcaacagcggaatggcgatcaagccggtaataaaaatcagaatcgacagcacggcggcaaaaatcggcctgtcgataaaaaagcgggaaaagtccatatgtcggattctcagataagggatcagttgatggcggcgctggcagtcatggcaacggtcttcgcgttaaccggcattcccggcataaacactttttgcaaaccatcgacgatgactttatccccagggttcaacccctgcttgacgatacgtaaaccggcagccagccgccccggcgcaatatcgcgacgctgggctttaccctctttatcaacgatatagacatatttacgatcctgatcggtcagtaccgctttgtcgtcgataagcgtagctttgaattcagcgctacccggcaaacggacgcgggcaaagagtcctggcgtgaacagacgctgcgaattgtccagcagcgcgcgcatgcggatcgtaccggtgctcggcgttaactgattatccagaaaatccactttaccctgatggggtagccctcttcgcccacaaggccgatctcaaccggtaatgcctgatgactgctggaggccccctgccccctgcgggcaagattttggtagtgaagataggttgactcatccacgtcaaagtagacgtaaaccgttttctgcgacaccagcgtggtgagaacgctggcggtatcgccagcggtgaccagattaccgctggtgattaacgcgcgactggcgcggccatcaataggcgcggtcactttggtgaagtccagattaagctgcgcggcatcaaccgccgcctgggcggcgcgaatatccgcttgcgcctggaccgcagcggagcggcgctgctcccactcttcacgggaaaccagattggtattgattaatttatcggtgcggtttgcttcacttcgcgccaggctggcttgcgttttcgctctcgccagggttgcctgcgcctgttccagcgccgcgcgataggttcgatcgtcaatggtgaataacacctcccccttcttcacctcctgaccgtcggtgtaattcactttatcaatataaccagaaacgcggggacgtagctgcacgctttccaccgcctcaatccggccattaaagctatcccactgactaatggatttcaccaccacctcagcggcgctgacggcaggcgcttgcggcgcggcgttttgcgcgacgccttcatcgcagccggcgagcagcgccgagagtagcaccatacctactgcagtcagatgacgttttccccaggttttttgcaggctcattatttttattccggtaattgtcaccgccgggcaagacgctgcgggagacgctgcgccacttcctttgtccgggcaggcttgaggccatttgtgtcgttcatcgccacaaaactgtaacagttgcgaatacactatcgcggcgattgtaggaaggcactaaactaagtgcaagaataattgttgcactttatgtgctattcttcaggatctaaaaaagcccacttcaggcaggggattaattgcaacaataaaacttgcaattagtaccaaaaccagccaccttaaaatgtaataattgaagatgcttttttatctacgtggagcaacaagatgaacactgctgcggttattcacgatctactcgattggatcgacaacaatctcgagagccgtctggatattgaaaccgttgccaggcgagcgggctattcgaaatggcacctgcagcggatcttcaaggagcacaccggttaccctctcgctgaatatattcgcatgcataagctacaaagatcggtcgaacgcttagccaacagcgacgagcccattttaaacgtggcgatcgcactgggtttcgactcccagcaatcctttaaccgcagcttcaagcggcagtatggtcaggcgcccggcgcctggcgacgcagtatctgcggcgcagaaacacagcatttacgctaacagtcgtgataaccgtcgtgataatcgtcctcagggattcggcgagcgaacagtagaagcacctatgtttagcagctatcagggcgtagcgcctaccgttatgattggcccataccaaacaaacaaggacgcgttaccatgctgaacaaatcgccgttggtgttgttattgttccctttactgctggcaggttgtcaccatcatcagcccacgccgcgcgcggcggcgagcgccactgaagtagacgatctgttcgccagcctcccttcgtcgaaaccatcgagtcgggttacctacgcccgacagataatgaccgccatcagggcaaaaatgcctgactccgtggagtatcccgggcaaacctgtcggattcgtttgtcgctgcagcgtgatggcaccgtaaattccgctaccgtggaaaagggtgatgaagaactatgcaacactgttgtatccgcatttatgcaagcagacattcccgccgcgccggatgatgacgcttatcagacgtttaaaaataccagtatcgattttaaagcataagactagcgctttattaccagcagcatggcattcaaccgaccgtaattcgtagtatattaaaaacaatctctgttatcaggtatacggaatgtcctactccatcggcgaattttcccgtctttgcggcatcaatgcgaccacgctgcgggcctggcaacgccggtacggcctgctgaaacccgagcgtaccgatggaggccaccgcctctataacgatgatgatgtccaactggcgctaaaaattctcgactgggtaaaaaaaggcgtgcctgtaagccaggttaaaccgctattgacccgccctgacgccgcccctggtgacagttggcttaccctgcaggacaacatgctgcagcggctgaaagagggaaaaatcgaatccctgcgccagttgatctacgatgccggtcgggaatatccccgccctgagctggttaccaacgtattgcgcccgttacgcagtaaagtatcggctaatgtgccggcgatgcagaccctgcgtgagatcctcgacggcatcattatctcctacacctctttttgtcttgaaggcgataaacgcgcgccgggcgataactctctgattaccggctggcacctgagcgacccatgtgaaatctggctggaagcgctcatgcgcaccggacaaggtcatcgcattgatgtgctgccgatgccgtccaccgcgctggccccggaaatattccctcaacgccactggttgctggtgaccacgggccagctcaccgccgcacgccagagacagatagacctctggcgtcagttggttatttctctggacgttatctccttgtaaaaaagctttgttctcctacgtcatgttctccactaaaaaagcacgccaaaaacttggacaaaaatacgcgattgtgtaagtttaatatatcgggctaaacgtttttgcacgatggcccatccagtgagagcaaagcgaggagtacgccatgaataagcaacctgtcattggcatcagcggctgtttaaccggctcgtccgtgcgctttgatggcggacataaacgattgccatttgcgatggatgaactggcgccgtgggtaaccttcaaacccatttgtccggaaatggccatcggtctcagctctcctcgtccggccctgcgcctggtgcagaccggcgaaggtgagattcagatgcgttttagcagcgagccgcacgacgatgtcacgggcaaaatggcggactttaccgccggttacctgcctgggcttggcgaattagcaggttttatcgtctgcgccaaatcaccgagctgcggcatggaacgcgtgcgactgtatgatgaaaaaggcaaccgcgggcgcaaagaaggaaccggcctgtttacccacgcgttgatggaagcctatccgtggttgccggtagaagaggatggacgactgcacgacccgcagttaagagagaattttgtcgagcgtcttttcgccctgcatgaactgaattcgctgcgggccaatggcctgacccgtcgggcgttaatggattttcatagccgctataaactgcagctactggcgcatcatcaggccggctatcgcgaaataggccctttcgtcgcgtcgatgcatcaatggcaagacctggatgcctttttcgtcgtctatcgcgataagctgatggcgatcctgaaaaacaccgcctccaggaaaaaccacaccaatgtgctgatgcatattcagggctatttccgcgaacggttgaatagccgtcagcgcggcgagctgcgtgacgtgatactgcattatcgcgcggggctgctccctatcctggcgcccctgacgctgcttaagcactacctggccgagtatcccgaccgctatctgctgacgcaaaactattttgatccctacccgcaggatttagctctgcggctgggcgttaattagccgccaggtagagtgctattacgacgaagcgtgactacttcttcttgttcatcatggcttttaaatcagcaaaaggattgtaggtagcttcaccgacatccttttgcgcatcttcaccggccaccactctggtaccgtactggtcggcctccgtgtacttggagtgctcatgatcgtggcaatagaggcacaatagctcccagttgctgccatcttccgggttattggtatgatcgtgatcgatgtgatgaaccgtcagttcacgcaggttggagtagacaaactcacgcgagcagcgtccgcagacccatggataaattttaagcgccttctcgcgatagccactttccaggcgggcgtagtttttggggatcagagccatggctgatgttacctatgataaagagataatttacgataatagcgccaatatagcgtaaaacggagcaggaaaggaaatcgatgcgctgagtgggcgggagcaaaatcccggcgtggcgccgggaagatgattattaatggctggtcactgccgccgccgcgaccggatgatccgctgaagcgacaaccgtggtacgcgccacaggatggcgaccgttatcgctggttgccgccgccaccgccaccggatggtcagccgaagcaacagccgcggtgcgcgccaccggatggttaccgttatcgctggtcgccgccgcgaccgccaccggatgatcggctgaggctacggctgcggtccttgcgaccggatggtaacccgcgaaggcagaaatacttgctgatgctaataccagggtcaaaataatctttttcatattatcacctctaataataataacctgaataaccaggcaaaatatggcaattaataaagccaattgatgaattaccgtagcaagcggcagcgaatatgaatagctcactgttatttaattatggataacccagcacacagcaaataaaaacgggaacccttaggctcccgtttcgcattaatccaaaaatctggattacatgtttttgatgatagcgtcgccaaactcgctacatttcagcagtttagcgccttccatcagacgttcgaagtcataggtcacggtcttggcagcgatagcgccttccatgcctttaacgatcaggtctgcggcttcgaaccactgcatatggcgcagcatcatttctgcagacaggatgatggaacctgggttcactttatcctggccggcatacttcggcgcagtaccatgggtggcttcgaacagcgcgcactcgtcgccaatgttggcgcccggcgcgataccgataccgccaacctgcgccgccagggcgtcagaaatgtagtcgccgttcaggttcatacaggcgataacatcgtattcagccggacgcagcaggatttgctgcaggaacgcatcggcgatcacgtctttaaccacgatctctttgccggtgttcgggttcttgattttcacccacgggccgccgtcgataagctcaccgccgaactcttcgcgagccagctggtaaccccagtctttgaacgcgccttcggtgaacttcatgatgttgcctttgtgcaccagggtcacggaatcacgatcgttggtgattgcatattcgatcgcggcgcgtaccaggcgtttggtcccttcttcagagcacggcttgatgccgataccgcaatgttccgggaagcgaattttcttcacgcccatctcatcgcgcaggaatttgataactttgtcagcttcggcagaatctgctttccactcgatacccgcataaatatcttctgagttttcacggaagataaccatatcggtcagttccggatgtttaaccgggctcggggtaccctgatagtaacgtaccggacgcaggcaaacgtagaggtccagctcctgacgcagcgccacgttcagagagcggatgccgccgccaactggcgtcgtcagaggacctttgatagcaacgcggtaatcacgaatcagatcgagggtttcagcaggcagccagacatcctggccgtaaacgtgggtagatttttcaccggtgtaaacttccatccaggaaattttacgctcgcctttataggctttctcaacggcggcatcaaccactttcagcatcgctggggtaacgtcaacaccgataccgtcgccttcaatgaacgggataatcgggttatgagggacgttcagtttgccgttttgcagggtgattttctgaccttccgccggaactactactttgctttccattaacctctccttcgagcgcttctggttctgctcttccctcttcacgcgagcctggtgttggcttagtcggcctactcctgagtaccgggtcgccccgctaaccggagattcgcgtccgtgttgccttcctgcctgtattgcgaatcggtttgagcaattttttgttaataatttgtaatgagcatgtcaatactacctgaatgtttgcgtccatgaaaggcattcgtaattaggctataatgcggcaattgagagagcctgaaaataccatgcagaaaacttcatttagaaaacatcgcgttgagcgattcagcacacaacaagtgaccagacaacgtaaagaacgccagcttaaaactgtgatcttgttcaataaaccctacgatgtgttgccgcagtttaccgacgagtccgggcgccgcacgctgaaggattttatccctgtcgccggtgtttacgccgccggtcgtcttgaccgcgacagcgaaggtctgctggtgctgaccaacgacggcgcgctacaggcaaaactgacccagcccggtaagcgcaccggcaaaatttatttcgttcaggtggaaggcgaacctacggaagacgcgctcagcgcgctgcgcgacggggtgacgctcaacgatggccccaccctgcccgccggcgtggagttggtggatgaacccgcctggctttggccgcgcaatccgccgattcgcgagcgtaaatcgattcccactcgctggctaaaaatcaccctctatgaggggcgcaaccgtcaggttcgccggatgactgcccatgtcggttttccgacgctgaggctgattcgctacgccatgggcggctatacgcttgatggcttagccaacggcgagtggcgtcaaaccgaataataccattcataaggaaattcgatgtttaaaccgcacgtcaccgtcgcctgcgtggtgcacgccaaaggcaaattcctgattgttgaagagacgattaacggcaaagcattatggaaccagccagctggtcatctcgaagccaatgagaccctggcgcaggccgccgagcgcgaactgtgggaagagaccggtattcgcgccgcgccgcagcacttcatccgcatgcaccagtggcaggccccggataacacgccgttcctgcgcttcctatttgccattgagcttaacgatacgtgcgctactgaaccgcacgacagcgacatcgatcgctgtctgtggctcagcgctgaggaaattcttaacgctaaaaacctgcgctcgccgctggtggcggaaagcattcgcagctatcagcaggatccgcggcatccgctgtcgctgattgcggaatttaactggccgttcacagggggtgcctgaacggttgacgcgtgctagaatacgccgccttgaagttcaatgtggtgagtattccaatgtcagaaagtccaaaaaaagtgatcgtcggcatgtccggcggcgtcgattcctctgtttccgcctacctgctgcaacagcaagggtataaggtggaaggcctgttcatgaagaactgggaggaagacgacggtgaggaatactgcaccgccgctgccgacctcgccgacgcgcaagccgtctgcgataagctcggtattgaactgcataccgtcaactttgccgcagaatactgggataatgtcttcgagctgttcctcgaagagtataaagccggccgtacgccgaacccggatatcctgtgcaacaaagagatcaaattcaaagccttccttgagttcgccgcagaagatctcggcgctgactacatcgccaccggtcactacgtgcgccgcgccgatgtcaacggcaaaagccaactgttgcgcgggctcgacggcaataaagaccagagctatttcctctacaccctcagccacgaacaaattgcgcaaagtttgttcccggtcggtgagctggaaaagccgcaggtgcgtaaaatcgccgaagagctggatcttatcaccgcgaagaaaaaagactctaccggcatctgctttatcggcgagcgtaaattccgcgacttcctgggccgctatctacctgcgcagccgggcaaaatcatcaccgtcgacggcgatgagatcggcgaacaccaggggctgatgtatcacaccctcggccagcgtaaagggcttggcatcggcggcaccaaagaaggtagcgaagatccgtggtatgtggtcgataaagacgtggaaaacaacgtgctgatcgtcgcccagggtcacgatcatccgcgtctgatgtccgtcggcctgattgcccagcagttacactgggtcgatcgtcagccgctgcggggcacccttcgctgcacggtgaaaacccgctaccgccagaccgacatcccctgcaccgtgaaggcgctggatgacgaccgcatcgaggttatctttgatgaacccgtcgccgccgtgacgccggggcagtcggctgttttctatagcggcgaagtgtgtctcggcggcggaattatcgaacagcgcctgccgctggcgtcttgatcgaccattttccgccggatgcctgattaacgcccggcgggttacaaggagtaagcgtggcgaagaattattatgacatcactctggcgttggcgggcgtatgccaggcagcgcggctggttcagcaactggcgcatcaggggcattgcgatagcgaagccctgcacgtttcgctgaacagcatcatcgatctcgacccggattcaacgctggcggtgttcggtggtagtgaagccaatcttcgtctcgggcttgagactctgctcggcgtgctgaataccagcagccgtcagggcctcaacgcggagctcacccgctacacattgagcctgatggtgctggaacgtaaactcgccgccagcaaagggcgatggataccctcggcaaccgcatcggcggcctgcaccgtcagttagaacattttgatctacaatctgaaacgctgctcagcgcgatggccggcatctacgttgacgtcattagcccgctggggccgcgcattcaggtcacaggttcccctgccgtgctgcaaagcccgcaggttcaggcgaaagtacgctctaccctgctcgccggcattcgttccgccgtgctctggcatcaggttggcggcggacgtctacagctcatgttttctcgaaatcgtctggttaaccaggcaaaacaaattcttgctcatttaaccccggagttatgatttatggaattatcctcactgaccgccgtttcccccgtagacggccgctacggcgataaagtcagcgcgctgcgcggtatcttcagcgaattcggtttgctgaaattccgtgtacaggtagaagtccgctggctgcagaaactggccgcgcacgcagcgatcaaggaagttcctgcttttgctgccgacgcaaacggtttccttgataaaatcgttgccgacttcagcgtagaggacgcggagcgtatcaaaaccatcgaacgcaccactaaccacgacgtgaaagcggtagaatatttcctcaaggaaaaagtcgccgatatcgccgagctgcacgcggtgtcagaattcattcacttcgcctgtacttctgaagacatcaacaacctgtcgcacgcgctgatgctgaaaaccgcacgtgacgaagtggtactgccgtactggcgcaagctgattgacgcgattaaagatctggcgacccaataccgtgacgtgccgctgctttctcgtacccatggacaaccggctaccccgtccaccatgggcaaagaaatggctaacgtcgcttaccgtatggagcgccagtaccgtcagctgaaccaggtggaaatcctcggtaaaatcaacggcgcggtcggtaactacaatgcccacatcgccgcctatccggaagttgactggcatcagttcagcgaagagttcgttacctcgctgggtatccagtggaacccgtacaccacccagatcgagccgcacgactacatcgccgaactgtttgattgcatcgcacgctttaataccatcctgatcgatttcgatcgcgatgtgtggggctacatcgcgctcaaccactttaaacagaaaaccatcgccggcgaaatcggctcatcaaccatgccgcataaagtgaacccgattgacttcgaaaactccgaaggcaacctcggcctggcgaacgccgtgatgcagcatctggccagcaaactgccggtttcccgctggcagcgcgacctgaccgactccaccgtgcttcgcaacctcggcgtgggcatcggctatgcgctgatcgcttaccaatccactctgaaaggcgtgagcaaactggagctgaatcaggatcgtctgctggacgaactggatcacaactgggaagtgctggctgagccgatccagaccgtcatgcgccgctacggtatcgaaaaaccgtacgagaagctgaaagagctgacccgcggtaaacgcgttgatgccgaaggcatgcagcagttcatcgacggtctgccgctaccggaagcagaaaaaatccgcctgaaggcgatgaccccggctaactacatcggccgcgcaaccaccatggtcgacgaactgaagtaaccggcctgactcaggtagcatgcgcaatctattcgcacatgctacctggcaatcccccgctttccgcgcagaaaaaaatctctcccgcctggtttaaataatgtttatccccagcgccgcataatggcgttaaactattaaaatcgaaaatgaaatggagaatgggcatgcgcgtactcgtcgttgaggataatgctctgctgcgccatcacctcaaggtccagttacaggaactggggcatcaggtggatgccgcggaagatgcaaaggaagcagactactacctgggcgagcatatcccggatgtcgccatcgtcgacctcggcctaccggatgaagacggcctgtcgctgatccgccgctggcgtagtcacgacgtatcggtaccggtactggtgctgaccgcccgtgaaggctggcaggataaagtcgaggtgctgagcgccggcgctgatgactacgtcaccaaacccttccacatcgaagaagttgccgcccgcatgcaggcgttgctgcgtcgcaatagcggccttgcctcacaggttatctcgatcccgccgttccaggtggatttatcccgccgcgagttgtccatcaacgaccagccgattaaactcaccgcctttgagtacaccatcatggaaacgctgatccgcaaccgtggcaaagtggtgagcaaagattcactgatgttgcagctttacccggatgccgaactccgcgaaagccacaccatcgatgtgctgatggggcggctacgtaagaaaatccagacgcaatatccccaggacgtgatcactaccgtacgcggccagggctacttattcgaactgcgcggatgaaaggcgtgttgcgacatattctcccgctttctcttcgcgtccgtttcctgctggcaaccgccgccgtagtgctgatcctatcgctggcctatggcatggttgcgctggtaggctacagcgtgagctttgataaaaccaccttccgcctgctgcggggcgagagcaacctgttctacatgctggcgaagtgggaaaataaccacatcgatgtcgatattccggaacacctgaatatgcagagcccgacggtgacgctgatttacgacgccaaaggtaaactgctgtgggcgcagcatgacgtcccctggctggtgaaacggatccaacctgaatggctgaaaagcaacggcttccatgaaatagaagccgatgttggcagcagtagtctgctgctgcgcaataatgatgaaattcgcgagcagcttgacgccatccgcgaggaagatgactcctcggagatgacgcactcggtggcgattaacctctatccagccaccgcgacgatgccgcaattaagcattgtggtggtcgacaccattccggtggagctaaaacgctcttatatggtgtggagctggtttatctacgtgctggcggccaacctgctgctggtcatcccgctgctgtggcttgccgcctggtggagtttacgccctatcgaatctctggcgaaagaggtccgcgagctggaagaacatcatcgcgagaggctcgattctcacaccactcgtgaacttaccggcctggtcagtaacctcaatcgcctgctgaaaagcgagcgtgaccgctatgacaaataccgaaccaccctcactgacttaacccacagcctgaaaacgccgctggcggtgctgcaaagcaccctacgctcgctgcgcggcgagaaaatcagcgtcagcgaagctgagccggtaatgctggagcagattagccgcatctcgcagcaaatcggctattatctgcaccgcgccagcatgcgcagcggcaatgcgcttctcagccgagaactacacccgatcgccccactgctggatagcctgacctccgctttaaataaggtctaccagcgtaaaggggttaacatcacgctggatatttcgccggagataagctttgtcggcgagcaaaacgactttatggaagtgatgggcaacgttctcgataacgcctgcaagtactgtctggagtttgtcgaagtctcggtacgccagaccaacgacaaccagttgcatattctggtggaggacgacggccccggaattccccgcaaccagcgcacggcggtgttcgatcgcggccaacgcgccgatacgttacgtccgggtcaggggtaggcctgtctgtcgcccgtgatatcgtcgaacagtatgatggcgatatcctgactggcgacagtctgctcggcggcgcctgcatggaagttatctttggccgccagcttcctgatgataaagagagctaacgcaacagttttttaacggcgcctgcatcgccgcggcgccgcatccgttataatcccagacagacacctgctgtggaatataaatatggactatcaattaacgcttaactggcccgacttcatcgaacgctactggcaaaaacgcccggtagtgttaaagcgcggcttcgccaatttcatcgacccaatcagcccggatgaactggccggcctggccatggagagcgaggtcgacagccgcctggtgagccatcaggacggaaaatggcaggtcagccatggtccatttgaaagctacgatcatcttagcgaaaacaactggtcgctgctggtgcaagcggtaaacaattggcacgagccgacggcggcattgatgcatcccttccgcgccctgccggactggcgtatcgatgacctgatgatctctttctccgttcccggcggcggtgtgggtccacaccttgatcaatacgacgtgtttattattcagggcaccggccgccggcgctggcgcgtgggcgaaaaggtgccgatgaaacagcactgcccgcatcccgatctgctacaggttgatccattcgaggccatcatcgatgaagagatggaacctggcgatattctctacattccgccaggattcccgcacgaaggctattcgttggaaaattcgcttaactattcggtcggctatcgcgcgccaaatgcccgcgagctgtttagcggctttgctgactatattttgcaacgagaactgggcagccagcgctatgccgatccggacgtgccatcccgcgaccatccggccgatattctgccggttgaactggatcgcctgcgtgagatgatgctggggctgattaaccaacctgaacactttaaacagtggtttggcgagttcattacccaatcccgccacgagcttgacgtagcgccgccggagccgccctaccagccggacgagatttacgatgcgctgcagcagggcgataaacttgcccgccttggcggcctgcgcgtactgcggatcgatggcgaagtgttcgtcaatggtgaaaaaatcaattctccgcaccgcccggcgcttgacgcgctggcaacacatctgtcgctgcgcgccgaacatttcggcgatgcgctggaagacccatctttcctcgccatgctggctgcgctggtcaacagcggatactggttcttcgaggactgagtcgacaccctgcccggtggcgctacgcttaccgggcctacaaacggcatcaacccgcaccctgcccggtggcgctacgcttaccgggcctacaacggcaacaaccacaccctgcccggcggcgctacgcttaccgggccgacaaacggcatcaacccataccccgcccggtggcgctacgcttaccgggcctacaacggcatcaaccacaccctgcccggtggcgctacgcttactgggccgacaaatggcatcggtaccgtaggccggataaggcgtagccgccatccggcatattaccgccgctctccggcatctatttcgaccgtatccccagcccaatcctcaggatataaccctttcctcacatcgcggtggaacgttgaatatggccaatccctcacgcatccaacaagccgatgtttcactggattgatataaacgtaatccatatggcgccgataatcttcatcattacggatggcatgttcccaaaaacgcggctgccagatctggttttgcgctaacgcacgcgtaaaagactttttaatctcccgccaacgaccggaataatcggaatcaccctccggtaacgtccagatacagtgcatatgctcaggtaaaataacccacgcgttaatctggaagggctttttgcgtttaacgagtgcgatcgccgtgcggagttgatcgattcgacgagtcagaagatcgctttgacggttttgcaaattgacggtaaaaaaccaagtgccgccggggatataactacggcgataatttgacatcagaggttccctcctcttcagcttatacagactctttttgcccggtggcgctgcgcttaccgggcctacaggaccgggctatgggtttaacgttttgccgtcagctccgcaatgcgcacaataacctgcacggctttttccatgccctccagagtgacaaactcgtgcttgccgtgatagttgtagccgccggtaaacagattcgggcacggtaaccccatgaaagagagctgagcgccgtcggtaccgccgcgtattggctttatctgcggctcaatatcgcagtccaccatcgcctgacgcgcgatgtccactacgtgcggatgggcaatcaccttctcatgcatgttgtaataactatcttcgatcaccagttcaatgtagcaatccggatgtagccctttaccgacctttttggcgatctccatcattttgcgtttgcgcgcttcaaactgcttgcgatcgaaatcacgcaaaatgtagtgcatctccgcccggtcgacgctgcccttgatgctggtcaggtgataaaagccttcataaccgtcggtggtttccggagcctcactggccggcacttcggcgtgaatacgcgccgctaacgataaagcgttaaccatcacccctttcgcggtgccgggatgcacattattgccaacgattttgatagttaccgacgcggcattgaaattttcaaactccagttcgccgaccccgccgccatccacggtgtacgcccagcgggcatcaaacgcggcaacgtcaaagtgcttcgcgcctttgccgacttcttcatccggcgtaaaggcgacgcgaatatcgccgtgagggatctttttcgcctgcagcgtcgccagcgccgtcatgatctctgcgatgcccgctttatcgtcggcgccgagcagcgttttaccatcggtggtaatcagggtctggcctaacagctgatgcaggaccgggaacatcaccggcgacaacacttcatcgccgatgccgagggcgatatcgccgccgcggtagttttcgacaatttgtgggttcacgttcttaccgctgaaatccggcgatgtatcgacgtgggaaataaaaccgatggccgggatttcgcctgcgacgttggccggcagggtccccatcaccgtgcccttctcacttaacgtcacgttgaccagccccatctcttccagctggttctgcagcaaacgcagcagcttccactgcccttcggtactgggaacctgacgcacgccaggcttcgattgcgtatctaaagaaacatactgcagaaaacgctcaagcaatttatccatgtggccaccctctttttttgtgacaacattatcaataagggcgaaaagacaaatattgcgtcaggtcatttttagcccgtaaaccaaaatttaatacatttacatgcattatgtgtaaaggtgatacaccgcggtataacaatgattggcgattacaatcgtttgccgtaaaatgctggcccttattaattatgtgcaaccccaaaggtggttaatcacaaaccccgcagcgattccttttccgttgcgtctacatgggacagagtcaaaaattgaatatacaaccgcgttcgctttctccgctggtacaactggcgggaattcgcaaaagctttgatggcaagaccgttatctccgatctcaacttaaccatcaataatggtgaatttctcaccctgcttggcccctctggctgcggtaaaacaaccgttcttcgtctaatcgctggtctggaaagcgtcgatgtcggacgtatccaccttgaagaccaggatatcacccatgttccggcggaaaaccgccacgtcaataccgtattccaaagctatgcgcttttcccgcacatgaccgtgtttgaaaacgtcgccttcggcctgcggatgcagaaaaccccggcggcagaaatcaccccgcgggtggtggacgctttgaaaatggtacagctggaggcgtttgcccagcgtaagccccaccagctctccggcggccagcagcagcgcgtcgccatcgcccgggcggtggtcaacaaaccgcgtctgctgttgcttgatgaatccctctcggcgctcgactacaagctgcgtaagcagatgcagaacgaactcaaagcgctacagcgcaagctcggcatcacttttgttttcgtcacccatgaccaggaagaagccctgaccatgtccgaccgcattgtggtgatgcgcgatggcaaaatcgagcaggacggtaccccgcgtgaaatctacgaagagccgaagaatctgttcgtcgccagttttattggtgaaatcaacatcttcaacgcgaccgtcattgaacgcctggatgaacagcgcgtacgcgcctgcgtcgaaggccgcgagtgcaatatatacgtcaacttcgccgttgaaaaagggcaacagctgaacgtactgctccgtccggaagatctacgcgttgatgaaattcatcacggcagcgaagcggatggccttatcggttacgtgcgcgaacgcaactacaagggaatgacccttgagtcagttgttgagctggaaaacggcaagatggtcatggtcagcgaattcttcaatgaagacgatccggactttgaccactccctcgaccagaaaatggcgattaactgggtagaaagctgggaggttgtgctggccgatgaagaacaccagtaaattccaaaatgtggtgatcgccaccatcgtgggttggcttgtgctgttcgtctttctgcccaacctgatgatcatcgcgaccagcttcctgacccgcgacgatgcaaacttcgtcaaaatggtcttcacgctggataactactcgcgactgctggatccgctctattacgatgtgctgctgcattcgttgaatatggcgctgatggcgaccctcgcctgcctcgcgttgggatacccgttcgcgtggtttctggcgcgcttgccgcaaaaggtacgcccgctgctgctgttcttgctgatcgtcccgttctggacgaactcgctgatccgcatctatgggctgaagattttcctcagtaccaaaggctatctgaacgagttcctgctgtggttaggggttatcgatacgccggtacgcattatgtacacgccgtcagcagtgattatcggcctggtctatattttgctaccgtttatggtgatgccgctctactccagcattgagaagctggatcgcccgctgctggaggcggcaaaagatctcggcgccagcaagctgcagacttttatccgcatcattattccactgaccatgccgggaattatcgccggctgtctgctggtgatgctgccggcaatggggctcttttacgtctcagacctgatgggcggcgccaaaaacctgctgatcggcaacgttatcaagagtcagttccttaatatccgcgactggccgttcggcgcggcgaccagtattaccttaacgctggtgatggggctgatgttgttgatttactggcgcgcggcgcgtctgctgaataaaaaggtggaactggaatgatcggtcgactgctgcgcggcggctttatgaccgccatttacgcgtatctctacatccctattattattctgatcgttaattcgtttaaccgctcgcgctttggcattaactggcaaggcttcaccaccgactggtatagcctgctgatgaataacgatagcctgctgcaggccgcccagcactcgctgaccatggcagtgttgtcggcaaccttcgcaacgcttattggctcgctcaccgccgtggcgctgtatcgctaccgttttcgcggtaagccgttcgtcagcggaatgctattcgtcgtgatgatgtcgccggatatcgtgatggctatctccctgctggtgctgtttatgctgatcggtattcaattgggtttctggtcgctgctgttttcgcatatcaccttctgcctgccattcgtggtggtgaccgtgttctctcgcctgaaaggctttgatgtgcgcatgctggaagcggcgaaagatctcggcgccagcgagatgaccatcctgcgcaaaattatcctgccgctggcgctgccggcggtagcggccgggtggctgttgagctttaccctgtcgatggatgacgtggtggtctcttcgtttgtcaccggtccgggttatgaaatcctgccgctgaagatctattccatggttaaggtcggcgtttcgccagaggtgaacgcgctggcgacgattctgttggttctttcgctggtgatggtcatcgccagtcagttaattgcacgtgataaaactcaggggacgttaaaatgaaaaaatggtcacgccacctgctcgctgcgggcgctctggctttgggcatgggcgccgcgcaggcggacgatagcaaaacgctctacttctataactggaccgaatatgtgccgccaggcctgctggaacagttcaccaaagagaccggcatcaaggtgatctattcgacctacgagtcgaatgaaaccatgtacgccaagctcaaaacctataaagacggcgcttacgatctggtggtgccatcaacctatttcgtcgacaaaatgcgcaaagaaggcatgctgcaaaagattgacaagagcaagctgagtaacttcagcaacctcgatccgcagatgctgaacaaaccttttgacccgaataacgactactcgattccctacatctggggcgcgacggcaatcggtgtcaatagcgatgctatcgacccgaaaaccgtgaccagttgggccgacctgtggaaaccggaatataaaagcagcctgctgctgaccgatgacgcgcgcgaggtgttccagatggcgctgcgcaaactgggctattccggcaacacgaccgatccaaaagagattgaagcggcttataacgagctgaaaaagctgatgccaaacgtcgcggcgttcaactccgataacccggcaaacccgtatatggaaggcgaagtgaaccttggcatggtatggaacggttccgcttatgtcgcacgtcaggcaggtaccccgctggaagtgatttggccaaaagaaggcggcattttctggatggatagcctgtcgattccggcgaatgccaaaaacgttgacggcgcgctgaagttgattaacttcctgctgcgccctgatgtcgcaaaacaagtagccgaaactatcggttatccgacgccgaacctggccgcgcgcaaaatgctcagcccggaagtcgccaacgataaatcgctgtatccggatgccgccactatcgaaaaaggcgaatggcaaaatgacgtcggcagcgccagcgccatttatgaagagtattaccagaaactgaaagccgggcgctaaccccgtaaggcggaaccctggttccgccttttttccccctacccgcctgatgctgtagataatgcacagactcagcggcggtcatctttcctcgcgcattaaaatctggccgtactcgtcacgaaggcggtttttcagcaccttaccggtggcgctaaccggcaacgcatcgataaaaataatgcgatcggggatctgccatttcggcacccgctcctgataccaggccagcagatcgacctcttcgacttcgcccccgtcggcgcggacgcacagcagtacagggcgttcatcccaacgcggatgacgtgcggcaatcgctgcggcgctgcgcaccgctggatgagcgatggcgatattctccagctcgacggtcgagatccactccccaccagatttaataatatctttcgcccgatcgtggataaccagatagccgttaacgtcgagggtgccgatatcgccggtgtcaaaccagccatcagcggtcagcgcactctcatcgcgaccaaaatagtgatcgaccacccagtggccgcgaacctgcaaatatccctgacttttgccatcacgaggcagcggtttcccgtcgatatccaccacccgcagatcgataccgaaaatcggccgaccctgcccatcactctgctgacgctgttgctccaccgggagtgcggcgtgcttactgagcagcgtattgatcgtgccgatgggcgacgtttccgtcatcccccaggcatggatcaactcaatatcataatcgcgcttaaacgcttctctcatcgatggcggtaacgccgagccaccgacgaaggagcgcttgaaataaggcaggcgaagatccgatttacgcagcgccgccagcagtccggcccaaatcaccggtacgccaaaagccacgctgaccttctcggcgctcagcagacgcagcaggctatcgccgtcaaggtgcggccccggcaacaccagccgcgcgccgaccatcgcggcaataaacggcgttccccaggcgttgacgtggaacatcggcactaccggcaacagcgaatcttgcgctgaaattcctgctccgtccggctggttgccgcttagcgcatgcagtaccagcgaacgatgggtattcagtacgcctttcggcctgccggtggtccctgaggtataacaaagcgaagcaggcgtcagctcattcaacccaggccaggaatagtcggcatccccctgctgcaacagctggtcaaaaaagcgtaatgacggcagccaatcctgcgcgtcttcactatgcggctccatcaacacgatatgcttaaccgtcggtagctgtggctgcagttgccctattaaaggcaggaaagtctggtcaataaacagcacctcatcggcggcatcattgatgatatacagcaaatgttcgaccgacagccgcggattgatagtgtgcgtcacccaaccgccggacgcgacggcaaaatagatttcgagatgacggcggttattccacgctaacgtaccgcaacgggcgccagcgggcaggcctaacgtcgccagcgccgaggccagtcgtctggcgttgcaggccacttctccccaactgctacgttctatctctccggcagtactcaccgagacaatttccgtctcgcgatgatattgcgccgcgtgttcgagtagcgtagagatagttaagtgctgataaatcatcggtgaaggcatcactgaagctcctggacaggctgaggatatagctgctgggattatcggagttaaagctggtgcctttaaatctggttcagattcgtcgctgcgcgcaaaaaaacgtacggaaatcagcgctaacgcacaaaaatttgagttaccggggaacgattgagggattacgcaagagtaaaaccgcaggcaatgaaccagaaagccgcgcccatagtaaaaggcgcggcgtataccactaaagtcctttcagcagcttatcaatgaactcaggcaccacttcgcttgccagcccgtaatgtttctcagcgaattcgctgccgacctggcttggttcaaggttaagctcgacggtatgcgcgccgtgcagtcgcgcttcatggacaaaacccgccgccggatagacgtgaccggaggttccgatagcgataaagatatcggcctcggccaacccgctgtagatctcatccatgcccagcggcatctcgccaaaccataccacgtgcgggcgcagcgccgccgggaactggcagcagtggcatttgtcatccgccgtcacgtcgccggtccattccagcacctgcccgctccacgaacagcgtactttcagcaactcgccatgcatatggataacccggcggttacctgcgcgttcgtgcagattatcgatattctgcgtcaccagcagaaaacgatcgccaagcgcctcttccagcctcgccagagccagatgcgcggcattgggcgcgatttccgcgctctgcaactggcggcgacgggcgttataaaacgcctgcaccagcgccgggtcgcgggcaaaaccttcgggtgtcgccacgtcttccacccggtgttcttcccacaggccgtcggcggcgcggaaggttttaatccccgattctgccgaaataccggcgccggttaacaccaccacccgcggtttatctattgcctgcggcggcgttttgtcttcgccgaagaagacacgttgccgtaagcgatcgcgcaactggcgttttttacggcggaaacggcttaagcgatgtaagcggcgcgacagcatagctacccctgtaattaatgagtcaaatgaaggaaggccgcaccgcgcatacctccggcgtcgccatgacgcgcgcgctcaatgcacggcacccgggcgaccggaagcaaatgacgcggcaggcgctgcgccagcccttcggttatagcagtaaaattagataatccgccacccaacaccagcagatccggatcgacaatggtgaggatattgcccagacaaacggccagcagatcgagataacgctcgacatgctcccgagcctgcgcatcaccctgcagccacagatcgacgatctgtggcgaagttaatgattgatggtaaaaatgctgatacagccaggcgaatccgcgaccggaaagatagttctcgatacagccgagctgaccgcaaccgcagcgggtcagcggaaaatcgcgccccaccacttccagggcgtctaccggtagacgaatatggccgaactcgccggtgatgtagctgtgaccggttatcgatttaccgttaagcacgatcccgccgcccacgccggtgccgaggattaatcccatcaccagcggatattgggtaaattcatcatcccacgcttcagataacgcaaaacagttggcgtcattatcaagacgcacttcacgccccaggcgcgcgctgagatcaacgcgcagcggttggccgctggcggcgggtacgttggcggcatacagcttgccgtccgcggtttccggcatgccggggataccgataccgaccgcgccctccacgccaaagcgccgatcggcttcgcgaaccagcgcttcaatcgcctgcaggaaagcctcatagctttccgttggagtggggacgcgtttttcccactgcagttgccgggcgttatcaaatacgcccaacgctatcttgctgccgccaatgtcaaatccgtagtacatttcagccattcctcttattggccccaacccctcatcctttgggctgtatctgctttcacagcactggcctaagggatgcggcgtttgacgggccacgacgataaattactggccactcagcaccctcgccgggtcaatacgactggcgcggcgggcgggataccagctggccagcaaactcagcaacagtgctgtcaccagcacataaacgacatccagccagtgcaattcagacggcaggaagtcaataaaatagatgtcgccggaaaggaatttatgcccgatcaacgcttcgataccgttgataatcgatgtcagcttcagcgcggctaccacgccgataactaccccgatcaggctcccgaccgaaccggccaataaaccataccatacgaaaatcgcgcggattaagccgtctttcgcgccaagcgtgcgcagcaccgcaatatcgccgcttttatctttcaccgccataaccaacgtcgagacaatgttgaaacaggcgacgccgataaccagtaccatggcgagatacataatggcgcggatcatctgaatatcacggtacatatagccataagtgccgatccagctcttgatatagacgtagctgttggtcacttcgccggcgtcgcgtaccagcgtattcgcgtgaaacacgtcggtgactttaatggcgatgccggtcacgctgctgcccatatccagatactgctgggcgtccgccattgggatcatcgcgaagctatggtccagttgaccgctcagttgcagaatgccggtcacgtgtagcctgacgcgtttcggctgcaacagctggtgctcggaatctgaattggggatcatgatcgacacccaatcgccctgcttcacatgcagcgcatcggcgacgcctttacccagaatcacctgctgctcgccggccttaaaactagcccaggcattgttctgcacaaagtgtggtagcgaactcaggcggctctcctgctgcggatcgacgcccttgacctgaatggcgcgcatattgctgccgctctccaccaacccggtaaagttgatataaggcgcagcggcgacgatgcctttcactttttcaaccttcgtcagcgcctcgttccagttattccatggctggttaaccggctcgatttcgccgtgcggcaccaccgccagaatgcgattattgagctcgcgctcgaaaccgttcatcgcgctcaagccgacgatcagtaccgccacgcctaatgcgataccgatagtagagatgacggaaatcagcgagaccataccaccgcggcgtctgccgcggctaaaacgcagcgcaatcagtaacgataacggtgaagccattactgggcccccatcagggtcaggtcagtcgtcaggcggccatcgcgcatctccagctggcggttcattcgtttcgccagttgcaggtcatgggtcaccaccaggaaagcggtacgctgcgccacgttgagctcgcccagcagctcaaaaatactgtcggcattgcgggcgtcgaggttgccggtcggttcatccgccagtaccagccgcggtttgttcaccagcgcgcgagcaatcgccacgcgctggcgctcgccgccggaaagctccgacggacgatgatggctacgatgctccaggccgaccgcctgcagcatcgctttcgcctgacgttcgatatccgccgcttttttcttgccaatcagcagcggcatcgccacgttttccagcgcggtaaaatccggcagcagatggtggaactgatagataaagccgagttcgcggttacgcagatcggcacgagccgcggcggagagcgagctcatcggctgaccggagaaaataacatcgccagaggtcggcgtatccagcccgccaagcaggtgcagtagcgtacttttgccggaacctgaagagccgacaatcgccatcatttcaccctcttgaatgctgaagctgacatcgtgcagcacatcggtttgcacgttgccttcctgatagcgtttgcacaggttgtcgcattgcagcaggatcttattcataacgtaaagcctcagcgggttgggtggcggcagcgcgccaggaaggatacaacgtagacagcagggccagcgccatcgccaccagagcgataataatcacctgcagcggctcaatcgccaccggtagggccgcgccgtccaaaaacgcgccgataatcggcattaaattattcagttggctggccagcagcacgccgagcagcgcgccaagcagcgcacctactatcccggcgctggcgccctgtaccataaagacggccatgatctgccgcggcgtcagcccctgggtctgcagaatagccacctcgccctgcttctccatcaccatcatgccaagcgaggtaataatgttaaaagcggcgacggcgacgatcaggctcagcagcagccccatcatatttttttccatccgcacggcctggaacagctcgcctttacgctcgcgccagtcctgccatttggtaccttccggcagcgtctgctggctgagggtgtcaacctgtagcggctggttaagccacagccgccaaccggtaatattgcccagtggatagcgcatcagacgagaggcatcatcgatattggtcagcatttgatagccgtcgacttcgctgttggcggcaaaggtgccgatgacgttaaacagacgctggctcgggacgcgccccatcggcgtaaactggctggcggaaggcaccatgacgcgaattttatcgccgcggttaacccccaactgacccgccagctgttcgccgagaatgacgttatatttacctgcctgcagatcgctctgtttgacgttgaccaggtaaggcgtcagcggatctttttgcgccgggtcgatacccagcatcacgccgacggcgacgctgcgggcactttgcaacaccacatcaccggtggtgagcggtgcgacgcgcgtcacgccctgcagcttaacggcgctttccggcattttttgcgggttgatagagccctgctgggcgctaatgatagcctgcggcatcagccccaggatgttgttttgcagctcgcgctcaaaaccgttcatcaccgacaggacggtcaccagcgccatcacgccaagcgtaatgccgatggtcgaaagccaggagacgaaacggccgaagcggtcggctgcgcgcccgcgcatgtagcgaaggccgataaatagtgcggcaggttggtacatgtaatccatctggttgctgatagccgatgttcgagtatatatggcatagcccaacgcgtaaatcgctgatacggtagattttttcgccaaaataacaaaataatacttttaaatcagaaagttaatttagagtgtatatatttatcaatcgccacgcgctgtagaaaacatggcgcagaaggccattcgggttggcgaaatcagaccaattgcggataatcagagacattgaatatcagcaatttgcccctacatcgaagagcgagttggccgactgcggccaaacagtacacacaatcgcctgatgggataggcgctaagggatcctgacaaccgttatgcctgaacaatatcgctatactctgccggtcaaagccggcgatcagcgccagcttggcgaactcaccggcgccgcctgcgccacgctggtagctgaaatggccgaacgccatcatggcccggtagtgctggtggcgcctgacatgcaaaacgccctgcgtttgaatgatgaaatcaggcaatttaccgatagcatggtgatcggcctcgctgactgggaaaccctgccctacgatagcttttcgccacatcaggatattatctcttcgcgccttgcgactttataccagttgccgaccatgcagcgcggcgtgcttatcgttccggtcagcactctgatgcagaaggtctgcccgcataattatctgcacggtcacgcgttggtaatgaaaaaagggcagcgtctgtcgcgcgatgcgctacgcacgcagttggacagcgccggttaccgccatgtcgatcaggtaatggaacacggcgaatacgcgacccgcggcgccttgctcgacctcttcccgatgggcagcgagcagccctatcgcctcgatttctttgatgacgaaatagacagcctgcggttattcgatgttgatagccagcgtactctggaggaagttgaggccatcaatttgctgccggcgcatgagttcccgaccgaccaggcggcgatcgaactgttccgcagccagtggcgcgatcgctttgacgtgaagcgcgatccggaacatatctaccagcaggtgagcaaaggtaccctgcctgccgggatcgaatactggcaaccgctattcttcaacgaaccgctgccgccgctgtttagctatttcccctccagtacgctgattgtgaataccggcgatctggagcacagcgccgagcgtttccagaatgaaacccgcgcccgctttgaaaaccgcggcgtcgatccgatgcgcccgctgctaccgccggaacaactgtggctgcgcagcgacgagctctttagcgagctgaaaaaatggccgcgggtccagttaaaaaccgagcgtctggcagagaaagccgctcatactaatctcggctatcaccccctgcccgagctggcgattcaggcgcagaataaagcgccgctggacaacctgcgacgcttccttgaatccttcagcggcccggtgattttctcagttgaaagcgaaggccgtcgtgaggcgctgggcgaaatgctggcgcgcatcaaagttgcgccaaaacatatattgcgcctgcaggaagccagcggaaatggtcgcttcctgatgatcggcgccgccgagcacggatttatcgacagccaggctaatctggcgctgatttgtgaaagcgatctgctgggcgaacgcgtcgcccgccgccgtcaggattcccgccgtaccattaaccccgatacgctcattcgcaacctggcggaactgcatatcggccagccggtggtgcaccttgaacacggcgtgggtcgttatgccgggatgaccaccctcgaagccggggcatcaaaggcgaatatctgatgctgacctacgccaacgacgccaaactgtacgtcccggtatcgtcactgcatttgattagccgctacgccggcggcgcggaagaaaatgcgccgctacacaaactgggcggcgatgcctgggcgcgggcaaggcaaaaagcggcggagaaagtgcgcgacgtggccgccgaactgctggatatctacgcccagcgcgcggccaaagaaggcttcgcctttaagcatgaccgcgagcagtatcaattattctgcgacggtttcccgttcgaaaccacgccggatcaggcgcaggcgatcaacgccgtcctcagcgacatgtgccagccgctggcaatggaccgcctggtctgcggcgacgttggcttcggaaaaaccgaagtggcgatgcgcgccgccttcctcgccgtcgaaaaccacaaacaggtggccgtgctggtgccgaccaccctgctcgcccagcagcactacgacaacttccgcgaccgcttcgccaactggccagtacgtattgagatgctatcccgtttccgcagcgccaaagagcaggcgcagatcctcgaacaggcggcagaaggtaaaatcgatattctgatcggcacccataagctactgcaaaatgaagtcaagctgcgcgacctggggttattaatcgtcgatgaagaacaccgcttcggggtgcgtcataaagaacgcatcaaggcgatgcgcgcggatgtcgatatcctgacgctgaccgccacgccgatcccgcgtacgctgaatatggcaatgagcggaatgcgcgatctgtccattatcgccaccccgccggcgcgtcgtctggcggtaaaaacctttgtccgcgaatacgacgcgctggtggttcgcgaggcgattctgcgtgaagtcctgcgcggcggtcaggtctactatctgtataacgatgttgaaaatattcagaaagcggcggatcgtctggcggaactggtgccggaggcgcgaattgccatcggtcacggccagatgcgcgaacgcgaactggaacgggtgatgaatgatttccatcaccagcgttttaacgtgctggtctgcacgacgatcattgaaaccggcatcgatatcccgaccgccaataccatcatcattgagcgcgccgatcacttcggccttgcccagctgcaccagttgcgcggccgcgtgggccgttcgcaccatcaggcctacgcctggctgctcaccccgcatccgaaagcgatgactaccgacgcgcagaaacgcctggaagctatcgcttcgctggaagaccttggcgccggctttgccctcgcgacccacgatcttgaaattcgcggtgctggcgaactgctgggagaaggccagagcggacagatggaaactattggcttctcactgtatatggaactactggagaacgccgtcgatgcgctgaaagagggtcgcgagccgtcactggaagatctcaccagccaacagacggaagtggagctgcgcatgccggcgctgctgccggatgactttattcccgacgttaacacccgtctgtcgttctataagcgtatcgccagcgccaaaagtgaacacgatctcgatgagatcaaagtcgagctaatcgatcgctttggtacattgccggatgcggcacgtaatttgctggatattgcccgtctacgccagcaggcgcaaaagctcgggatccgcaagctggagtgcaatgaaaaaggcggcgtgattgagtttaacgagaaaaataatgtgaacccggtctggcttatcggtctgctgcagaagcagccgcagcattaccggctggatgggccaactcgtctgaaatttttccaggaactggaggagcgtaaaacacgtatggactgggtacgtcagtttatgcgccaactggaagagaacgccaccgcttgataaaaaagagatgcggttgtctgaaccgcatctctttacctgtcacagttagcaaactttacaaacattttgcaatccacctggatttcccaacactctcccgcgccataattgacattgattatcttataaaaataaccattttgtttattgtggaattatggtaatgataaatatatcgcgtgtttcaacatggcttacggcattcgctctcgcggcgacgctggccctccccgcccgcgccaatacctggccgctaccgccgagcggtagccggctggtcgggcagaatcagtttcatgtggtgcaggataacggcggatcgctggaagcgattgccaaaaaatacaacgtcggttttctcgcgctgctacaggctaatcctggcgtcgacccttatgtgccgcgcgccggtagcgtgttgactatcccgctgcagacgctactgcctgacgcccctcgtgaaggtctggtgctcaatatcgccgagttgcgcctgtactattatccgccgggacagaatagcgtgaccgtttacccaatcggtatcggccagcttggcggcgatactctgaccccgacgatggtcactaccgtttccgataagcgcgccaaccccacctggacaccaaccgccaacatccgcgcgcgatataaagcgatggggattgatttaccggcagtggtcccggccgggccgaataacccgatgggacatcacgcgattcgtctcgcggcctacggcggcgtctatctgctgcacgggaccaacgccgattttggtatcgggatgcgcgtcagttcaggctgtattcgcctgcgcgatgccgatataaagtctctgtataacaaaatcacgccgggcaccaaggtgaatatcatcaacgaacctatcaaagtttcggtagaaccaaacggtacccgtcttgtggaagtccaccagccgctgtccgaacacatcaatgacgatccgcagacgctgccaatcgtcctgaatgccagcatgaagaactttaagcaggcgccgcagaccaatcagcaggtgatggaatacgcgatggagctgcgttccggaatgccggtcgatgtgacccgtcaccagattcccgccgagcaagccatgtagtgcatttccggatggtagaatgtaaaaaacccgccgtgcctggcgggtttttttgtggcaatcgccagcttcgctgacgaggtttcgcggggcgcggtcccatgaaggggtgtggaccgcgtcgcgagagtggcataacaaagggaacgacttttactgcttactacacgcgttctgctgaaggggtcaggaacgcgttttgtcagtggcatgacaggggttacaacatttatttatagataactgcggtaccgtgcagggtattaggaccggttaccgaggtaatacggtaagaggtcgcccccatctcgtcggctttctgcgccagctgatcttcaagcgaacccagattggtgccggcagaagcggaaacggtaccgattttatgttgacctgctggggtggattgcacctcaacagcggcgaaacttgcgaatgagagtgagctcagtacggcagcaagtgccagtttttggacgtttttcatgattattatacctatgcagatgatttttatagtagggtcgcaagaattaacttaacgatcgataggtaaatgatagtgtgatccaggtcacaggtcaactcatttttataacgatcatttaactatttataaaacgcttaattttcatacatatatgaattatttatttttagacttgtgccgctggcagccagacgtgtttatttttataatggccattcaacaacccaacataggtacaacggcatcatgacaactgacgttcaaagttgcgcaaaaaaaagccgtggccgacctaaagtgttcgacagggacgcggcgctggacaaggccatgacacttttctggcagcacggctatgaagcaacttcgctggccgatctcgtcgaagcgaccggtgcgaaagccccgacgctatatgccgagttcgtgaacaaagaaggattgttccgcgcggtgctggatcgctacatttcccgcttcgccgccaaacacgaagccctgctattcgatgacgacaaaaccgtcgatcaggcgctgcgcgactatttcaccgctgtcgccacctgctttaccagcaaagataccccggcaggctgttttatgattaacacctccgcggcgcttgccgcctcttcaaccgatatcgccaacaccattaagtcgcggcacgcggtgcaggaacaaacgttgacgcaatttttacagcagcgtcagcaacgcggcgaactccctgcgcagggcaatgtcttgcagctggcgcagtttttaaactgcatgctgcaaggaatgtcgatcagtgcgcgtgaaggggctgatttcgccacactgaaacaaattagcgacactacgctgcgcctgtggccgcaaatcctgcaaccttaatcccctgccggcggccgtcgctcgccggtttttcccccatctgctgaatacctctgcttttctcaaccttttcattatgttgatttgttgtaaatgatattgataacaataatcaatatgtgcaaaattcgcatttgtctttcagtatgtttcacgctgtaacagccgcgcctgcggctgaaaaaaataacaacagtcatgaccaactcatatcaaggaatgcgaatgaacaagcgcctctggctgctcaatcctctactgctggccaccgccctgccagcttttaccgcgcaggccgccgatgaagacgatattatcgtcagcgccaaccgtaaccaccgtaccgtcgccgagatggcgcaaaccacctgggtgattgaaggccaggaaatcgagcaacaggttcagggtggcaaagaatttaaagacgtcctcgcacagttgatcccgggatcgatgtcagtagccaggggcgtaccaactacggcatgaacatgcgcggacgcgccatcgtcgtgctcatcgacggcgtgcgtctcaattcatcgcgtaccgatagccgccagcttgatgccatcgatccgtttaacatcgaacatattgaagttatttccggcgccacgtcgttatacggcggaggcagtaccggcggtctgattaatatcgtcactaaaaaaggccagcaggaacgccaggtggatctggagctgggtggtaaaaccggctttgctaatagcaacgatcatgatgaacgggtggcggcagccgtcagcgggggtaccgatcatgcttccggccgcctgtcggtcgcgtaccagcgcttcggcggctggtatgacggcaacaatgacgcgctgatcctcgataatacccaaaccggcttacagcattcggaccgactcgacgtgatgggcaccggaaccatcgaaatcgatgaccagcgccagctccagctagtcacgcagtactataaaagccagggcgatgattatggtctgaatctgggcaaagatatgtcggcagtgcttggagaaagtaaagcctggacctctaacgggcttaactccgatcgcgtgcctggtactgagcgtcatttgatcagtctgcaatattccgacgccgacttcttcggccagaatctggtcagccagatttattaccgcgacgaatcactgaccttctaccccttcccggccctgagcaaaggtaacatcagcagtttttccgcctcgcagcaggataccgatcagtacggcgctaagatcaccttcaacagccagccgctgacgggatgggatctgacctggggcgttgacgccgaccatgaaaccttcaattccaaccagatgtttttcgatctggataaagcgatggcttccggcggcctgaataaccagtcagcctataccaccggccgttaccctggctacagcatcaccaatctcgcgccgttcctgcaaagcagctacgacctgaacgacatcttcacccttagcggcggcgtgcgttatcaatggacggaaaaccgggttgatgactttgtcggctacgctcagcagcaggatgtcgctaaaggcaaatatcagtccgctgacgccattcctggcggcaagaccgattatgataacttcctctttaatgccgggattgtcgcccgccttaccgaacgccagcagacctggtttaacttctctcagggcgtcgaactgccggatccgggcaaatattacggtatcggcagctacggcgcggcagtcaatggtcatctgccgctggtctcgagcgttaacgtcggcgactcgccgctgcaggggatcaaagttaactcctgggagctgggttggcgctatactggcgacaacctgcgcacccagcttgctgcttattactcaacatcagacaaaaccatcgtggttaaccgcagcgatatgaccattgatgtgcaatcggataaacgacgcatttacggtgtggaaggcgcggtggactacttcgtgccagatagcgactggagtctgggtgctaacttcaacgtactgaaatcgcaagttaaaaccgatggcagttggcagaaatgggacgtcaccctggcatcgccgtcgaaagccaccgcctgggtcggttgggcgccggacccgtggtctctgcgtgtgcaaagccagcaggtatttgatttaagcgacgccagtgggaataagcttgatgggtacaacaccgtcgattttatcggtagctatctgctccctgtgggcaaactgacctttagcatcgaaaacttgctgaacgaggattacgtcaccatctggggacagcgcgcgccgctattgtatagtccaacctatggcagcgccgggttgtacgaatacaaaggtcgcggccggaccttcggcctgaattatgcgttaacgttctaataaaaaaagcccctcagcctgagtgattgaggggctaatagcttaaaactgctgttttacgctttgttattcagaatcagctgaccgttgctgtccagcgggatttgcgctcccggctggtggtccatacgaatcttgccctgctggtcaccgattttataggtgacatcataaccgagcattttttccgacttgtcgtagaccgtcttacaccgctgctgggtggtggtataggtgtcgttttcctgcatcgaaccctgaatttggttaccggcatagccgccgcccagcgcgccaacgacggtagcgacatcacgccctcgcccgccgccaaactggtggccaattacaccgccagcaaccgcgccgagaacggaaccggcaatacggttttcatcctgcaccggacgacgatgggtaacggtcacgttacggcactcctgacgcggcgtttttatgctttcttttatcggcgtactggacaccacttgcgcatattgcgggccacgatctaatacattgagaccggcaacggcggcgacgcccaacgcggcggcaacgccaatcccaatacccgccaacattgatttattcacgggaattcctccttcattgctgttactagcaattctgcgttctgctcagggggatgcaaatcagaaagcggatgaaaaatgcgggaacctacggcaaatcaaggggattcagaggattcctaacagaaattagcgattctggcagaaggatatgctgtgttttcaggatagcgccgcgatggcgctatcctgcttgctgacagcttagtgcagcttgagacgcggacgaatgatgcggttaatacgtcctaccaacatcatcaggccggtcttgaaatagccgtgtaacgcaatctgatgcatgcggtacagcgagatatacacgaagcgcgcaattcgcccttcaaccatcatcgagccacgcatcaggttgcccatcaggctgccaacggtggagtagttcgacagggagaccagtgaaccgtgatctttatagacatacggtttcagcgctttacctttcatctgtgccagaatgttattcaacgcgcaagttgccatctggtgcgccgcctgggcgcgcggtggtacaaaaccaccttccgggcgagcgcaggaggcgcagtcgccgatggcgtagatatccggatcacgcgttgtctgcagcgtcggctccaccaccagttggttaatgcggttggtctccaggccgccaatctctttcataaaatcaggcgctttgatgcccgccgcccacaccatcaggtcggcatcaataaattgaccatctttagtatgcaggccgttaacgtctgcgctggtgaccatggtctgcgtcaggacacgtacgccaagcttagtcagttcattgtgcgcggcgccggaaatgcgcggcggcagcgccggaagaatacgttcgccggcttcaaccagcgtcacgttcagcgcttcgttagtcaaccctttgtaaccatagctatgcagttgtttcaccgcattatgtagctcagcggacagctcaaccccggtagccccgccgccaacgatggcgatgttgaccttaccgttcgcgccgaggtttgcagaatacttgaggaacaggttaagcatttcctgatggaaacggcgcgcctggtgcgggttatcaaggaaaatgcagttttccttcacccctggagtgttaaagtcattggaggtactgcccagcgccatcaccagcgtatcgtacggcagcttacgctcggcaaccaacagctcgcctttctcgttgcgcagttccgcgagggtaatagtttttccttcgcgattgatatccaccaccgagcccaactggaactggaaaccgtggttgcgcgcatgcgccaggtagctcagcgcgtcaacgccttcatccagagaacctgtagccacttcatgcagcaacggcttccacaggtggctatgattgcggtccaccagcgtaattttcgcttttttgttgcggcccagctttctacccaactgagtagccagttccagtccgccggcaccaccacctacaataacgattcttttcaatggcgtagtcacaagacccctaaaagtattaaccaattgttaattaaaagttatcaaaatagctcttagttaacaataagttgcagcgatgaaaccattcagcacgaccgagaatagcatgaacggaacattggtcataccaaaattgatgtgcatcaagttttaccgcatattttttaaacgaacaacgtcaattatggacaagaaaaagcccgcggcgtttgcacgcggcgggctgagtaagtgaaaacaggattagccgagggtcttaaaagcctttattcgctgcaggtgcggtgaaagacttttaaatttgtgcgtctgttcttcatcccagatgatttcgtaataatgatgcagcaattcagccgaacgttggctatccagcgcctcatcatggcgtgatagcaccaccaggcagcggtcgcgatttttttcgcggaagttgttcacgcacttggtggcaatatcctgatactcttccggcctgtcgattttcccttccatgttctcgtaggggaacagattcgggttgaacacggcctggcgaatatcgcagaggaaaccgatcctttccgcccagtagccgcctaacccgacgccgcatatcagcggccgatcgtcggcagtgagctgcagcattttgtcgacttctttcaacaaatgctgcatatcatgttttggatgaagcgtgctgtagctaatcaaccgcacgtccggatcgataaactgcagctgcagcaccttttcatggttaccggggctgttagagtcaaaaccgtgtaagtagataatcatcgtatcctcaccagacaacaacgcccttcaggttaattacgcagacttcgcttcctgccagcgctcatggagctgttccagctgtgcactgaccgtttgccaacgagcggaatctcgcagttcctgacgggtaaatgaacctttatgatacaattttgtaacacgctctgctttgatcggggacaggttatccaatacgctcaccgcgcctttacgattattgcagaccaggatcatatcgcaaccggcatcgagcgatgcttgcccacgttcagcatagctgcccatgatcgccgcccttccatcgacaggtcgtcagagaagatgacgccatcaaagcccagctcaccgcgcagcaccgttttcaaccagtattctgaaccactcgccgggcgaggatcgatgtcagagtaaatcacgtgcgccggcataatcgcatccagccgttgctcatcgatcagacttttgaacaccgccatatctttggcgcggatttcagctgccggccggggatcgaatggcgtctctttgtgtgaatccgccgtcaccgcgccgtggcccgggaagtgtttaccggtggttttcataccggcggcgtgcataccgtcaatgaaatgacgcgccatcaccaacgctttttgcgggtcttcatgccaggaacgttcaccaatcgcagcgctgatatggcccacatccagcaccggtgcaaagctgatatcaatatccatggcgatcatttcgctggccatcagccaaccggcttctgcagcgagtttaccgccctcttccacccccagcagggcggcaaaagactgcgcagccggcaggcgagtaaaaccttcgcgaaaacgctgcacgcgcccgccttcctgatccaccgccaccacgagatgattacgcgaggcctcgcggatttggcgtaccagttcacgtaattgcgccggatcgtggtagttgcgggtaaacaaaattaagccgccaaccaaaggatgagccagaatatcacgctcttccgcatccagttcaaaaccttcgacatccaacattaccggacccacactgacctctcttatcctttattttctgtttttaactgacgccatgtcgcatccgccagcgcaataaattgccggtcgccgctctgctgccagcgccgttcataccagcccgccatcagtatgagcacccacggccgccaacgctctatttgccgccgtagctgacgctcatcaagatgcgcgagccgcgaataggcttttaccagttgccgacgcgtgcagacatcgcaccacaccgccgccagttcaagcgcgatatcgccgtctccggcatactcccagtcaatcaagcgcagaccgtcgcggctatgaataatattaccggcgtggacgtccatatgcagaggcgctaaacgcaacggccgcggttcacgctggcgcaacaaccgtttctgccagcgcagccagaaaacggtacgcctggtcggatcgcactgctgccagtacaactcaagcaacggcgccagctcgatgcgccagccaaaacgcggctgttggtgcagatgatacaataagccggcaagcgaagggcactccggcagcgagcttttcacttctcctgcgcaatactccaccaccatccagcgcggcgaaaagaacaccggcgccggcgaaagcgtcgcgggaaggtgctgaagcgcgcggtactggcgcagaaaatggctgagcggcgccagcggatcgtgaggctggcgcaataccagccgaccgacgccatcgctgagaatgcagctgccgccgctgagaccgttttcagtcagcgcggcgacaggcgaatagcggggaaaaagcgcgacaggagctcgtcgcgcgtaagcttattgttgctgaactgcacctttccctgaccaaattatctcgccggactgcaccagcatcagctgcattttcagctctggcgcattgacgttgccggtagcgttggaatacagcacatactgagcgccaacggtgcgcgcaatccccatcgctttgctgcggctgccgaggctatcctgcggcgacagacctaattgctgtttcgctacggagagctgctgcggggacaccagcgtaaacttgccgttgcccgccagcgcgttacgcagcgcggaggtcgcttcggacgcgttcagcgatccgttggtacggttgttgacgctatccaccagcagaatactgcccgcgttcacgccgcccgcctgcagcatctggccgatcatcggttgcacagccccatcccagttgtagtggcgcactcgcggcgcaggctgagagggctgtgaaggctgctcgctgccgtgttcaatcggccccggctgcgttggcaccgtcggcacggcaggtaccgtcggctgcggctgcgcaggctgttccggcttcggcttcgcctcctcgactggcgcaggttcattacgttgccccacacagccagccaggaatatcgccagtgctgtgattaacgcatagcgacacattttaatcattatgatgacctcttagagataaagataaaggcgggctttgtgcgccccgagaatattggcactgccgtagagcacgacggatgaacgggcaggaaccgtcacgctacgcgcaggttccagcggatgcatctccaacccatgggcgtcataccagaaaaaacggtagtgcacggtaatgggctcttgccgttcattaaataatcttgaggtagcggtggcctgaatttccgaagcggtcaccgatggcggatcggcgctgatacccgccgccagtacgctggattccatcaccaaagtctgctgttcgccaaccggaatttccgggcgcgaactacaacctgtcagcagagccgccagaatgagtacgccagaataagcagcgcgcatcgttttagcctttatgcgccagcatcgggcccaacggacggccgcccaacaggtgcatatgaatatgataaacttcctgcccgccgtggcggttgcagttaacgataagacggtagccgtcgtcagccagaccttcatcacgggcaatcttcgccgcgacggtcatcattcggcccaacgccagttcgtgctcggtcgtaacgtcgtttacggttggaatcaggatattcgggataatcagaatatgggtcggcgcctgcggagagatatcgcgaaaagcggtgaccagttcatcctgataaacaatatccgacgggatttcccggcgaatgattttgctgaaaatcgtttcttctgccatgactgattccttatttgttttataccgtgctccggcctgcctctgcagataaacgcgaatgcacaggatcagctaagagtatgagcgacttcctccctctctttcaacctgaatgcagtttttcttattcaactatagacttagctgctgagggaataagcatttcccccattttccgggtattgccaaacaatgaccagaatacccacgtaaaaaaggcagccatttggctgccttagtctccccacactacgtcttagctgttgcggatgtactcatccatctcggttttcaggttatcggacttggtaccgaaaatagcctgaacgccggaacctgcaacaaccacgcccgcagcacccagttttttcaggccagcctgatcaactttcgctacgtcagccacgcttacgcgtagacgagtgatacatgcgtcgaggtttgtgatgttctctttaccaccgaaggcggcaatcagcgccggcgccatttcactggtcgcagcggatttgctgtcttcagttgcatcttcacgacctggagttttcaggttcagcgctttaatcagcacacggaagactacgtagtacacgatcgcatagcaaataccgacaatcgggaacagccacagcttgctgctgttgccggacagaacgataaagtcgatcagaccgtgagagaacgaagtcccgtcacgcatacccagcaggatacagattgggaatgccaggcccgcgagaatcgcgtggatgatatacaggattggcgcaacaaacatgaaggagaactcgatcggctcggtaataccggtcaggaacgaggtcaacgccgcggagatcataataccgccgactttggcgcggttttctggtttagcagagtgccaaatcgcgatagctgcagccggcaggccgtacattttgaacaggaagccgccagacagtttacccgcagtcgggtcgcctgccatgtaacgcgggatgtcgccgtggaacacctgacctgcagcgttggtgtattcaccaatttgcatctggaaaggtacgttccagatgtggtgcagaccaaacggcaccaggcagcgttcgatgaagccgtagataccgaacgccacaaccgggttctggtaagcagcccattgagagaaggtctggatggctgaaccgataggcggccagataaaggacaggatcacgccggtgaagatagcggcgagaccagagataatcggcacgaaacgcttgcccgcgaagaagcccagatattcaggcagcttgatacggtagaagcggttgaacatataggctgcaatcgcaccggagataataccgccaagcacgccggtatcagccaggtgtttcgctgcgatttcctcagcaggtaaatgcagaaccagcggcgcgactaccgccatggttttcaccatgatgccgtaagctacgactgcagccagtgcggatacaccgtcgttattggtgaagccaagcgcaacaccgattgcgaagatcagcggcatattggcgaaaactgaaccgcctgcttctgccataacgtgggaaaccacggctggcagccaactgaagttggcagaaccgacgcccagcagaatacctgcgataggcagtacggatactggcagcatcagcgatttaccgaccttctgcaggttagcaaatgcattcttaaacataattgagagtgctcctgagtatttggtacttttttacgctttcacgcattggcccgggggagaaccgtgccgtggacaggacatctaagcgccctttatttattacacagagtaaaataattaacgcggagattgtttgacggctatcacgtttcattcagtcaacatataaaaacttacactgatttacataatgtgtatctgtatgttgcaaaaatgcgctcaccgcctctgtcgcggcggtgaactttactcgttttaactattaattacgagccttaaaataatagaaagatcaggcaggttgcagtctggcagggtcgatgtggaacaagctggcaaagttttcactggtttgttgcgcaagttgctccagcggcacgcctttcaacaccgccatgtattcggcaacatcgcgtaccatcgctggctgattctctttaccgcgatgtggcaccggcgccaggtacggcgaatcggtctcgaccagcaagcgatcgagaggaacatagcgcgcggcatcccgtagctgctcagcgttacggaacgtgacgataccggaaaacgaaatatagaaccccaggtccagcaatttacccgctgtctccctatcctcagtgaaacagtgtagtacgccgccgcaatccgtcacgttttcttcctgcaaaattgccaatgtatcggcacgcgcatctcgagtatgcacaataaccggcttattcaattcgcggccaatgcggatatgctggcggaaagactcctgctggcgaagtttcgtttccggggtataaaaataatcaagtccggtttcccccatcgccacaacgccctcttccgccgccagcgtacgcagctcttcgaagtcatacgcttcgtcctggttaagcggatgcacaccgcaggaaaacacgacgttatcacgctgaccgactagctcgcgcatcccgcgatatcccggtagcgtcgtggcgactgccaggcaaaacttaacatcacgcgcggcggctttcgccagcacatcatcgacatctttatgcagcgtttgataatccaggccatcaagatggcagtgggaatcgactaaaaacatgttcttattctcagagatgtgagacgggcagaaccgcccgggttgcaggtaatgttcccagcgcagaaggcgctcggtgagcagcagttcacggttgacgccgaccacgctcagcagctgttcgcgacaggcgctgacatcgcgcgtgatagcttccagacgagggcctgagagtgtttgcgccagctgattaaccagcgtccaggcatccggattactcacaagcgaaataccctgctgccttttttgcgcatccagcagcagcgatgccagccagtgcaaacgcaccggagcctgttcgtgattcagaaccggtaataatgacagccagtcgccgcttgttaacgcgctggctagcgcctggcaaagctgttgtcgcggtgtccagttagcctcttgcagtaacgccagcgctgccgcgggcgcgttagcactgaggcgcagcgcggccaatagagtttcttgtgacattgtcacttcacgctctaaccaccctaatgcccaggcttcagaaggcggagcaaggtgatatgagaaacatctgctacgcaaggtggcgagtagacgcgccggatcctggcaggccaggaaaaaccaggtgttttccggcggctcttccagcgtcttcagcaaagcattggcggcggcatcggttaacaacgtcgcatcgttgatccacaccaccttcgcgccaccgagacgcgcacgctcatagagtttttcagtgatgccgcgcaccgcatcgatgcctagcgcgctcttgcctttctccgggacaagcgtgtagtaatcaggatgggtgccggcctgcataagctgacaactatggcaatggccgcagcttttatgcccttccggctggcggcacatcaggaatcggcataatgcgtagataagcgcatcgcccccattcccggcaacgcctgcagtaataacgcatggtgaccccgacctgcctgataaccagctacaagctgctcgaaggacgggcgtaaccacggataccatttcatgcgcgctgctccgcaacccattgagtgataacggcgcgaatgtcgcgctcaaccgcttccagaggctgcgtcgcatccaccgtgcggatagtcggatcctgcgccgccagctcaaggtagcgcgcgcgggtacgattaaagaaattcatcgactcctgctcaatacgatccagatcgcctcgcgcgcgggcgcgcttaaggccaacttccggcgtcacgtcaagatagagcgttaaatcaggacgaaaatcgccgagcaccgcatcgcgtagcgtcgccagcattcgctgatcgataccgcgtcccccgccctggtaggcctgagttgagagatcgtgacggtcgccaatgacccattgaccgcaggccagcgccggcttgataacggtttcgaccagctgtacgcgggcggcgtaaaacatcagtacttccgctttatcgttaatgacttcatcgccggtagactggatatccagcaccaggctgcgcagtttttcagccaggatggtaccgcccggctcacgggtaaacaccatatcgcggatacccagctgttcgagtgtctcaacgaccagattgcgtgcagtcgttttccccgccccttccaggccttcgatgacgatatagttactgcgcatttttttccttaagtacttttaaatagtcctgaaccgaacggttatggctggccagattggtattgaacgtatggccgccttttccgtcagcaacaaaatagaggtacggcgttttcgccggatgagcggccgcattgagagatgcttcaccgggcacggcgattggccctggcggcataccgctaatgacataggtgttataagcggtcggcgcctccagatctttacgcgacagtttaccattatagcgctcacccatgccgtaaatcacggtggggtcggtctgtaaacgcataccaatgcgtagacggttgataaagaccgacgccacgcgatcgcgctcggcaggaaccgcggtctctttctcaacgatagaggccatggtcagtaactggttttgatctttatagggtagattatccgcccgcccttcccaggttttcgccactgcggcgaccatcttctgatgcgcgcgtttaagaatggcgatatcgctggtattggcggtgtacatccaggtatccggccagaaccagccttcaacccaatctgcgtgctcaagacccagcgctttggcgaccgtttcgtaactgtcgtcttctaaagtgtgcttcacatacggcgcatcgcgcagttgacgcaaatagtcgctaacgcgcatcccttcaacaaaccgtagcgggaactgcgcttctttaccgctcgctaaaagctgcagcatctcgcgcaccgtcatttgcggtgtgaagcgataggtacccgctttgaaatgagaaagttcaggttcgacgcgcagcagccactggaatacgcgtggacgattaatgattttatcgccatacagctgctggccaagcaccactcgcccggtgcctggctcaagggtgaagatggtctcttctttaataagcaacttactatctgccagttggcggactttccacatacctgccgctgcggcaataccgaacaccacgactaacagcaggacaaaacgtaacattttcttcatgactaaccaggcagctcacacaatggggctaaaaaatggtaaagatcgcgttcagaccaacagacgtcatcccaacgacaaaccggtaccagcggcataagcgcattgcaaatcagcacttcctcggcatcgcgcagcatttcagggcgtacggatacttcgacaacatcaaaaggcgaacgtgccaacatggctatgcagtgctggcgcataatgccattgacgcccgcctgatcgaggcgcggcgtgaatacatggcttcctttacgccagaacaaattcgcagcacagcattccgtaagccacccgtcgctgtcaagaaccagcgcctcatcggcgtctgtctgctcaagatgagaacgaattagtacttgttccaggcgattaagatgtttgagccccgccagcgagggattacgccccagacggattgggcttaacgccagggttattccctcttctcgccaacgcgcataatgcgcggggaaagaagaaacgctcataatgcgggtcggctgcatgcatcctttcgcgctatatccccggcctcctgaaccacgcgttatgaccactttgagtacgccttctcgatgtggctttgccagttcttgcatttctgcggccaacgtttcccattcagaaaaaggtatcaagagtttttcgcaagtatcttgcaagcggcccaaatgggcattgaagaaggctatctggccgtcgatgattcgcgaggtggtaaaacacccatcaccgaattgaattgcacggtcgtttgctgccagcacatcctgctcgacaccatttatcaagaacatagagggctcctctcaccggtggcacagtgtctcaggataaaaagcagagaacaagcggagaaaaccgaataaaaaaagacccgcctggcgggtcttttcgtcaatgcttaaaccagcattagcggttgatcatacttttttgaagataatcgaaccgttagtaccgccaaagccgaaggagttacacagggtatattccataccggaaacctgacgcgcttcatgaggaacgaagtcgaggtcgcaaccttcatccgggttatccaggttgatggtcggcggaaccgcctgatcgcgcagcgccagaatagagtagatagactctactgcgccagccgcgcctaacaggtggccggtcattgatttggtggagctcaccatcacgcggcttgccgcatcgccaaacacggatttcactgcctgagcttctgctttatcaccggctggcgtcgaagtaccgtgggcattgacatagccaatctgacccggttcaatcgccgcgtcgcgaatggcgttaaccatcgccagcgcagcgccagcgccatcttccggtggagacgtcatatggtaggcatcgctgctcataccaaagccaacgatctctgcgtagattttcgctccgcgttttttcgcatgctcgtactcttccagcacgaccatgccagcaccgtcgcccagcacgaagccatcacgctctttatcccacggacggcttgccgcctgcgggttgtcattgcgggtggacagcgcgcgcgcagcgccaaagccgcctacgcccagcggcgtactcgccttctctgcgccaccggcaaccatcgcgtcggcgtcgccataggcgataatacgtgccgcgtggccgatattgtgtacgcctgaagtacacgcggtcgcgatggagatactcggtccacgcagaccaaacatgatggtcagatgaccggccaccatgttaacaattgtggacggaacgaagaacgggctgatcttccgcggtccgccgtttaccagcgaactatggttttcttcgatcaggccgaggcccccgataccggaaccgatagcggcgccgatgcgggttgcgttttcttccgtcacttcaaggccagaatcctgcatggcctgaacgccagcgacaattccatattgaatgaaggcatccatcttgcgctgttctttgcgcgagatgatatcatcacagttaaaatcctttactaagccagcaaatttcgttgcataggcgctagtatcgaaatggtcgatcaggctgatgccactctgaccggcaaggagagctttccaggtagactctacggtattgccgacaggagacaacatgcccagtccggtcacaactacacgacgcttagacacggttgtcctccagggagggaaaatagattcttgtgggacaaaaaaagataaaactcaggcggtcgaatgaccgcctggagatgttcacttacgcctggtgaccgttgatgtaatcaatggcagcctgaacggtggtgattttctcagcttcttcgtccggaatctcagtatcaaactcttcttccagagccattaccagctcaacggtgtcaagagaatcagcgcccaggtcttcaacgaaggaagcattgttggtaacttcttcctgcttaacgcccagctgttcgccgataattttcttaacgcgttcttcgatagtgctcatactcttaaatttcctatcaaaactcgctttcgcgatggttttcgtagtgtataaaatgttgaaaaatttgcaactaaatcccggcaggtcttaccacgattttacgctattttgcggctgtttgccctaataacgcaaatgatttcgcacaaaacagtacccgcaagcgtgcagactgcgcgcttcctgaacattttgcgcaaatctcggtcagaccatatacatcccgccattgacgtgcagggtttcaccagtgatgtaacccgcttcgtcagaggctaagaatgcaaccgcgctggcgatttcatttggggagccaaggcgccccgcaggaactgccgccagcgtacccgcacgctgctcatcggtcagcgcacgcgtcatgtccgtttcaataaagcccggagcaacaacgtttacagtaataccgcgagacgcaacttcacgtgccagtgacttactgaaaccgatcagacccgctttcgccgcagcgtagttagcctgaccagcatttcccatggtaccaaccacagaaccgatagtgataatacgtccatgacgctttttcatcatagcgcgcattaccgcttttgacagacggaatacagatgacaggttggtttcgataatatcgttccactcatcatctttcattcgcattaacaggttatcacgagtaatcccggcattattgaccaggatgtcaacttcgccaaactctgcgcgaacattttccagaacagattcaatagatgccgggtcggtcacattcaacatcagccccttaccgttggcgcctaaatagtcgctaattgcctgcgcaccgctttcgctggtggcagtaccgataactttcgcgccacgcgcggcgagggtttcagcgattgcgcggccgataccgcggctcgcaccagtaaccagcgcgatttttccttcaaaactcatggtattcctcttttattgctcaagcgccgcagacatcgcagccggctcgttgagcgcagaagcagtcagggtgtcaacaatacgtttggtcaggccggtgaggactttacccgggcccatttcatacaggtgctcgacgccctgagatgccataaactcaacggtcttagtccactgaaccgggctgtacagctggcgaatcagcgcgtcgcggatagcatcaggcgcggtttcgcacttcacgtcgacgttgttcacaaccggaacggtcggtgcgttaaaagtgattttctgcagctctaccgccagtttttcagcggcaggtttcatcagcgcgcagtgcgacggcacgctgaccggcagcggcagcgcgcgtttggcgcctgcggctttacacgcggcgcccgcacgctcaacggcttctttgtgcccggcgataaccacctgacccggtgaattgtagttcaccggtgaaaccacctgcccttgtgcagattcttcacaggctttcgcgatggacgcgtcgtcgaggccaataattgcagacatcgcgccggtaccttccggtaccgcttcctgcatgaatttaccacgcagttcaaccagacgaacggcatcagcgaaatcaatcacgccagcgcagaccagcgcagagtattcaccaaggctatgaccggctaacagcgccggcgctttaccgccctgctgctgccatacgcgatataacgcgacggaagcggtcagcagcgccggctgcgtttgccaggttttgttcagttcttctgccgggccctgttgggcaagcgcccacagatcgtaacccaacgctgcggaagcttcgccgaaggtctcttcaattactggccaggtcgcggccatatctgccagcatacctacagcctgagaaccctgtcccgggaacacaaaagcaaattgcgtcatgtttaaatccttatactaaaaacgaaccagcgcggaaccccaggtgaaaccaccaccgaaggcttccagcagaatcaactggccgcgttgaatacggccatcgcgaacggcttcgtcgagcgcgcaaggaaccgaggcggcggaagtgttaccgtgacgatcgagcgtgaccaccacattatccatcgacattcccagctttttcgccgtcgcgctgatgatacgcaggttagcctggtgcggtaccagccaatccagcgccgagcgctcaaggttgttggccgccagcgtctcatcaacgatatgcgccagttcggtgaccgcgactttaaacacctcattaccagccatcgtcagataaatcggattttccggttcaacgcgatcggcgttcggcagcgttaacaactcaccgtagcggccatcggcgtgcagatgcgtggaaataatgcctggctcttcagaagcgccaagtaccactgcgccagcgccgtcgccgaagataatgatcgtgccgcgatcggttggatcgcaggtacgcgccagcacatcagcgccgatcaccagcgcataatcaacggcgccgtttttcacgtactgatcggcgatgctcagggcataggtaaagcctgcgcaggcggctgcgacgtcgaacgccgggcaaccttttacacccagcatagattgaatctggcacgcagagctcgggaaggcgtgcgtacccgaggtggtcgcaacaacgatcagaccaatttgctctgggttgacattcgccatttccagcgctttctttgcggcttcgaagcccatcgtagcaactgtctcgttcgctgcggcaatacggcgttcacgaatacctgtacgcgtgacaatccactcgtcagtcgtttcaaccattttttccaggtcggcgttagtacgcacttgctctggcaggtagctgccggtgccaataatctttgtatacatgtacgctcagtcactcttgggtaatatacccgcgttgttcaaaccgcagggcgtcagtcgtatccgttggtcccggtgtgctgtcgggcattcccgttaccgctgctgctccctggcagttcaaagcctgctgggtataacgattccaggcgagcggcgatccgctgtggaacctgccgctgcaccgcctgcactgcctgctctattgcgacgcaaaatgcgcgctggttggcagcgccatgacttttgatcacagaaccgcgcaatcctaacagacaggcgccattatactggtcggggttgaggtgactgaatcgcctactcaggcttttttgtaaccaacgctttaataaaatcagccaccacgaccgtttttttccctctccctgtgatttcagcagcgaaaggaacattctgacaacaccttccatcgtctttaatgtgacgttgcccgtgaatccatcacaaaccagaacatccgttttccccgtcagcaactcgttagcttcaaggtagccaatatagttgaaggtcggcagttttttgagaatcgccgacgcatctcgaatgctgttgagacctttcatctcttcttcgccgatatttaacaacgcaatgcgtggatttttaatccccaccacttcttcagctaacactgcgcccatcaccgcgaactgcaccagcatcgtactatcacaatcgacgttggcacctaaatccagcactaccgttttgcccttttgctgatgcggcagtaccgtcaccaacgccgggcgctcaatcccctcaatgggcttaagcaataatttagccagccccatcagcgcgccggtatttcccgcgctaacgcaggcttcagctcgcccttctttcaccagttccagcgccaggcgcatcgagcttccgcggctgctgcggatagcctgtgcgggccgcgcatcactggcaataactgactgtgcaggaataatctgcagtcgcgaacgttgttcgaaatcagctttggcaagtaatggcgtgatggcgtcggggtcgccgactaaaagaagtgtgagttgcgaattagaattcagtgcctgcagtgctgcaggcactgtcacggatgggccaaaatcgccccccatgacatctaacgccagggttagacgtgtcaaggtatcgtcgctgcccggttcggttattccccagttacctggggagatcctcactaagcttcaccacgcttttactcttgtcttccacgttacaaggacgttgactacgttttcttgcaacgtgaaatccacggagtaaggcgtgattacttagcgattaccttgcgaccgcggtagaaaccgtcggcagtgatgtggtgacgcaggtgtttctcaccagaagttttgtctacagacaggctggtgactgcggtcagagcgtcatgggaacgacgcatgccacgtttggaacgggttggtttattctgttgtacggccatggaccttactcctcaattacttatgctttaagctggctaatacggcaaatgggtttggtttttgtgcctcttcaggcagttcgccaaagaccatgtccgcgtcggacacttcacagtgttcagaatcatgcaccggaactaccggcaaggaaagaatgatttcatcctcaaccatcgcctgcagatcgatttcaccgaattcgttaacctcaatcggctcatacgcttccggtagtgcttctgcctgttcgtcatttctgacagggctgaaacaatacgttgtgtgaacatgatgagggaacggtttcccgcaacgctgacattcgagggttaccgacaccttcgcatcaccggtaataacggcaagacgctggttatcgatagcgaacgacatgctgcattccacatcactgtccacgctgacgactgaatcggcgacacggccaacctgatcacgggcgtagataccctcgtaatcaaggcgtttttgagccgtgcgaaccggatcgagagtcaggggtaattttaccttttgcatagggcgcgcatattaactttgtaatgtcatagagtcaaagaaaaaggcagcctcaggttgccttttgccatttattcgcacacattgcggcgcatagtttaaaatgatgctctgcgaagcgctatatgtggatgaaaaaatatgtctaatcttctcctggcttcaacctcgccgtggcggcggatgctgctggaaaaactctcgctgcctttcgaatgcgcagcgccggaggttgatgaaacgcctcttcccggcgaatccgcccgccagttggttgtgcgtttagcacaagccaaagcccaggcgctggcatcccgctttcctcatcaccttattataggttccgatcaggtttgtgtcttagacggcgaaatcaccggtaaaccgcacactgaagaaaacgctcaccgtcagctacgcaaagccagcggcacgattgtcactttttataccgggcttgcgctctacaattccgccaacggacacctgcaaacggaatgcgaacccttcgatgtccattttcgtcatttaagcgatcaggagatcgaggcctatatccgtaaagagaaccctctgcagtgtgccggcagttttaaaagcgaaggcttaggcatcacgctatttgaacgactggaaggacgcgaccctaattcgctggttgggttgccgctgatcgcgctatgccagatgctgcgccgggaaggctttaatccgctactcagttagacagataagaaagcggcggaatattaatccgccgctgtgcttatttgctattgcgcaaaacctgtaagcagtgtttcagttggttatccaacggcgcttcaatacgcatcacttcaccggtgcctggatgagtgaacttcagcgctgccgcatgcaaaaacaggcggtttaaacctgtccctgaaagttgcttgtcaaactcgcgatcgccatagcgatcgtcaaaagcgatcggatgtcccgcatactgcgtatgaacgcgaatctgatgcgtacgcccggtaaccgggctacagcgcaccagcgtggcaaacgcataacgctcttccactttaaagcgagtttcggacggcttgccttcctgactcacgcgcacgatgcgctcgccgctctgcagaatatttttcagcagcggcgcttgtaccaccttggtgtgcgactgccattgaccgcgcaccagtgccagataatccttctgcatccctttctcacgcagctgctcgtgaagcgagcgaagcgccgaacgttttttcgccaccaacagaacgccggaggtatcccggtcaagacggtgaaccagctccaggaagcgggcctcagggcgtagcgcacgcagcccttcaatcacgccgaagctcagaccgctaccaccgtgtaccgcagtaccggaaggtttattcagcaccaggatatgatcgtcttcatagaggataacatccgacaacgccgccactttttgcaggtgcggcgaaacggcctcttcttcgcgctcggcgacccgcaccggcgggatacgcacttcatcgccatcttccagtttatattccggcttgacgcgttttttgttcacccgcacctcgcctttacgcaggatgcgataaatcatgctcttcggtacgcccttaagttgcgtacgcaaaaagttgtcgatacgttgccccgcttcatcggcggaaatggcaaccatttttacggttggagtctcagttttcatggtcggcgattctaaatagccgagggcattagcgccactcatttttatatgcttatatttatcagtatccggttttcatcgcatgcttcatcggcgttttgtttgttattagaacaatctgtagacgctggtgaaaaaactgtgagtaacccggtgataaaaggtaaaagtgaacttgctataacaaggttagcaatggaataatgaagccgttttccgtgttgacacttgttagaacaagaaattagcggaatgaccaattttgtctgaccgatcatccacgcagcaatggcgtaagacgtattgatctttcagacagttagcgggctgcgggttgcagtccttaccggcacaggctctataagatttttgcgtggcaggacggcgtcgactccggaaccaccgggagttcatctgaatcctccgattgaggtgaacaggttaagccattacccctgcgacgtgagagacgatgagaatatacgcaacatcgtttgaggtgcgtcaaggctgcaaaagagagaatcttcagtcgcttgtacaagcaatcgattgaggtgaacaagcgcggccaacgcgaaatcacttaaaggatgaagtgtataaatggaatattctctggtgatacatcccaggctgttcccctgaataattgcgctgtgtttccgtttgaaacacaggcgaccgacactctgcgcctcttaagcgcgcgacaaccgtgaggttggcgacgtgaaccagactcgaggccatcggttttcacccggtaaggcgttactctgcccgtagcttagtcgtcaatgtaagaataatgagtaagttacgatgaaaagaatgttaatcaacgcaactcagcaggaagagttgcgcgtcgctcttgttgatgggcagcgcctgtacgacctggatatcgaaagccccgggcacgagcagaaaaaagcgaacatctacaaaggcaaaatcacgcgtattgaacctagccttgaagccgcgtttgtcgattacggcgctgagcgtcatggtttcctccccctcaaagaaattgcccgcgaatacttcccagccaattacagctctcatggccgcccaaacattaaggacgttctgcgcgagggtcaggaagtcattgttcagattgataaagaagaacggggtaataaaggcgccgcgctgaccacctttatcagtctggcgggtagttatctggtactgatgccgaataacccccgtgccggcggtatttcgcgccgtatcgaaggtgacgatcgtaccgagctgaaagaagcgctggcgagtcttcagttgccggacggcatgggtcttatcgtacgtaccgcgggcgttggcaaatccgctgaagcgctgcagtgggatctgagtttccgcctgaagcactgggaagcgattcagaaagccgctgagagccgccctgctccgttcctgatccaccaggaaagtaacgttatcgtacgtgccttccgtgactacctgcgccaggacatcggtgaaatcctgatcgataacccgaaagtgcttgagctggcgcgccagcatatcgccgcactcggtcgtccggatttcagcagcaaaatcaaactgtacaccggtgaaatcccgctgttcagccattaccagattgaatcccagattgaatccgcgttccaacgtgaagtgcgtctgccgtccggtggttctatcgttattgatagcaccgaagcgctgaccgctatcgacatcaactccgctcgcgcgacccgcggcggcgatatcgaagaaacggcgttcaatactaacctcgaagcggctgacgaaatcgcgcgccagctgcgtctgcgcgaccttggcggcctgatcgtcatcgacttcatcgatatgaccccggtacgccaccagcgtgcggttgaaaaccgcctgcgtgaagccgtccgccaggaccgcgcgcgtatccagatcagtcatatctcgcgcttcggcctgctggagatgtcccgccagcgtctgagcccgtcgctgggcgaatccagccaccacgtgtgcccacgctgtagcggcaccggtaccgtgcgtgacaacgaatcgctgtcgctctctattctgcgcctgattgaagaagaagcgctaaaagagaacaccaaagaagtccacgcgatcgttccggtacctatcgcttcttacctgcttaacgaaaaacgtgcggcagtcagcgcgattgaaacccgccagagcgacattcgggtcatcatcgtccctaacgatgagatgcaaaccccgcactactccgtactgcgcgtgcgtaaaggcgaagagacctcaaccctgagctatttgctgccgaaactgcacgaagaagagatggcgatgccgtccgacgatgaaccagctgaacgcaaacgccgcgaagagccagcgctggctgctttcgtgatgccggatgcgccgccagtaccggtgcaggaagaaaccgcagccgcgccggccgcagcgaaagccgccgctgctccggcagcgaaggtagcaacgcctgcccagcctggtctgctgtcccgtttcttcggcgcgctgaaaaacatttttgctggcgcagaagaagccaaaccggctgaagttcaggccgagcaaaaaactcaagagaaaccagagcgtcagcaagagcgccgtaaaccgcgttctaataatcgccgcgaccgtaatgaccgtcgtgaaaaccgcgataaccgtgacaatcgcgataaccgcggagaaaacgcggaaggtcgcgagtcccgcgagtcccgcgaggaaaaccgccgtaatcgccgtgagaaacaggcgcagaacgctgagcaacgcgaatctcgtcaaagcgcaagcaatgaggctgataacagcaaatctcgcgatgagcagcagcaaccgcgccgtgaacgcaaccgccgtcgtaatagtgatgacaagcgtcaggcacagcaggaagcgaaaactcagacccgcgaagaaccggtagtacagcaggaaaccgagcaggaagaacgcgttcaggctatgccgcgtcgtaagccgcgtcagctggcgcagaaagtgcgctttgaatccgcagaaaccgagcaggttgtcgaagccgttgccgagcagcaggcggaatccactacgccgcgtacggaactggcaaaagtcgatctgccggccgtcgttgaaactgccgctgagcaggatgaaaacggcgacgctcgtgaatctaacggtatgccacgtcgctctcgtcgctctccgcgccacctgcgcgtaagcggccaacgtcgccgtcgttaccgcgatgagcgttatccgacccagtcgccgatgccgctggccatcgcctgcgcgtcgcctgagctggcgtcaggtaaagcgtggatccgctatccgattgcccgtgcgcatgatcagcagcaggaagagttaccggtacaggaaaccgccaacgttgagcctatcattacgccagtcgtcgcggagactatcgctccggttgtcgttgcggaaaccgtcgcggctgaaactgtcgcaccggcagtggccagcgaaccgaccccagaagcgaccgtagttgaagctccggtcgtcgaagaaacgacggtggttgaagagaccgcagttgttgcggaaaacgttgcgccgcaggcagaagtcagtgagccagcagagccggtagtcgaagaaaccgagaccacacctgctccagctactgaagaaaccgtcgccgcacagccagcgattgccgcagaagaaaccgctgttgtcgaagaaacgaccgttgccgaagctgaagaagccgcgccggttgttgaaccgacgccggtcgtcagcgccgcgccagtggtgaaagcgcaaccggcaaccaccgcgactcgccacgcgaccgcgccgatgacccgcgccccggctccggaatacgtgccggaagcgccgcgccaaagcgattgggttcgcccaccgtttgcctttgagggtaaagggtccgcaggtggccatagcgccactcatcaggccacggcggaagctacccgtccgcagcctgtagagtaacggtgcacaactaaaaaaccggccaattggccggttttttttatttcttcacatccggacgctgcatccccgccacctgtggcatcacctcgcgcatcaaatcgagaaacttgcgtagccgcgtcgggtaatagcgcgcccagggataaaccagatgcaccggcagcggcgaagcccgccactgcgcaaacggctcaatcaacctgcctgccgcaatatcctcctccaccgcccaactggagacaattgccgcccccaaccccgccagggcggtgttacgcgcaacgtatacgctatcggtactcagacaagggacaatcgggaaattcatcaactgcccgtccaactgatgctgtagcgtgacttcatgctgataaaaggtactgatagcgacccagggcagcgtggagagtgcctgaggttcgctgagttccggatgtcgcgccattagctcaggcgcaaccaccaggctgcggggaaccacagccaataataccgataccgttgacggatcgacttccgcgccgacgcggatcgcgcaatcgatattatcgctaagaaagtcgacggttttatcattcagcatccactcaacggagagctcaggatatcgctgcagaaaactcaccagcggacccagcaactgctgttggccaaaagcgtgcggcgctcgcacccgcagcacgccaaccggccggtcttcctcgatgcgcagatcatcctccagcgccagccaactctccaccagccgtcgtgcatgttgataacagcgctcgccgtcatcggtcagtttcatcgcatgggtcgttcgcagaataagcctcgcgccaagtaacgtctccagcgattgcaaacgtcggctgacggtcgcctgagtcgtactcatctggagagccgccgccgagagcgaacccgcttcgacgatgcgaataaacgttcgcatcagctcaatccgatctatacgctcttgtttcttcatttatattttgcctatacgtgctacgtataaccgttttaccactaccctatcttccgcgccagtctgcttcgaggaacaatagcgccaacgcatctacgagggcattactatgacaccgcttcctttatccacccgccaggccggctgggttatttttattctcgcgctcggcgctggcttcagcgtcgcatccatctactacgcccagccgctgctgccgttaattggggccaacctgcatctcagcgttgagggaatggggctggtgcccacgttgacccaggctggctatgcattgggaatattatttctgctgccgctcggcgatcgccacgatcgcagaacgcttatcctgctgaaaagcgccgtgctggcggtactgttactactctgcagcctgaccggtcagcttacctcgctgctggtcgttagcctgctgatcggcatggcggcgaccatggcgcaggatattgtcccggcggcggcgattctggcgccggcgggcaaacaggggaaaatggtcggtacggtgatgaccggcctgctactggggatcctgctttcacgtaccgtcagcgggctggtcggcgcgctatttggctggcgggtcatgtaccaggctgcggcagtcagtatcgccttcatcggcctgttaatgtggcgtgttgtgccgcgttttgagatccactctaccctcagttatccgcagttgatgaagtcaatggcccatttgtggcagcgctatcccgcgctgcgccgcgcggcattcgcccagggctttttatctatcgcctttagcgcgttctggtcgacgctggcggtcatgctcgccgaacattaccagatgggtagcgcggtcgccggcggcttcggtatcgctggcgcagcaggcgccctggcggcaccactggcaggcggtttggcggataaagttggcgcagggagagtcacccagctcggcgcggcattagtcaccgtctcctttgccctgatgttgctactgcccgcgttgccggtacacggccaactggcgctgattgcgttatcgactatcggttttgaccttggtctgcagtcaagcctggtggcgcatcaaaatctggtttacagcctggaaccccaggcccgcggcaggcttaacgccttgctgtttaccatggtcttcatcggtatggctctgggatcggtgctgggaagtaaactgtacgtgctggctggctggaacggtgtggtgattctggcggtgagtagcggcgcgattgctctgattatccgcctgctggaaaatgcccgtctacaggccgcagaacgcgccgtgagataaaaaaacccgctccgcatggcggaacgggttaatcaggcccgacgttacgatgaatttaaatcgtgcggcgggcaaactctttcaggcgaaagccgagcagcagcaatgtcgcgaaataggcgactacgccagccaccaccaccaccatcagacgcatcaggcggaacggcatcgtcccctgcgaccattccggcatcagatacatcacgccgacgagcgctgcggccatgaccagcaccgcgatgaccagacgcagcaggaagacgaaccagcccggctgcggcgtgaagattttctgcttacgcagttgccagtaaagcagcgcggcgttcaggcaggcagccagaccaatagacagcgacaagccggcatgcttcaacgggccaataaacgccaggttcatcacctgggtcattatcagagtaacaatggcgattttaaccggcgtcttgatatcctggcgcgagtaaaagcccggcgccagcaccttcacgacgataagccccatcagtccaaccgaataagccaccagcgcgcgctgggtcatcgccgcatcgaaagcgttaaacttaccgtactggaatagcgataccgtcagcggtttggcgagaatgcctaaggcaaccgcgcttggcaaggccagcaggaagcacagacgcagcccccaatccatcagtcggcagtactcatcgtgattgccgctggcgaaactttttgataacgatggcaacaggatggtccccagcgccacgcccagcacgccggaggggaactccatcagacggtcggcataatacatccaggagaccgaacctgaaaccaggaaggaggcgaaaatggtattgataattagcgaaatctggctgacagagacgccgaggatcgccggccccatctgcttaaccacgcgaatcgccccggcatctttcagattaacccgcggcagcaccagcataccgatttttttcagatgcggcagttgatacgccagttgcaggataccgccaaccgtgaccgcccaggccatcgccaacattggcggatgaaaataaggcgcggcaaacagggcaaaaccaatcatgctgacgttgaggaaggtcggcgcgaaggcgggaaccgagaagcggttccaggtgttaagaatcgcccccaccagcgacgccagcgaaatcaataaaatataggggaaggtgatacgcagcagctgggtggttaaggcaaatttatccggcgtatcggcaaagccaggagcggtaactgttatcacccacggcgcagccagcatccccgccaccgtgaccagcgccagaaccagcgtcaacagcccggaaacataggagacaaagactcgcgtcgcgtcttcgccctgcttgcttttatattcagcgagaatcggcacaaaggcctgagaaaaggcgccttcggcaaaaatacgccgcaagaggtttggcagtttgaaggccacgaaaaaggcgtcagtcgccatcccggcgccaaaaatacgcgcgacgatagcatcgcgggcgaaccccagtacgcgcgagaacatggtcatcgagctgactgccgctaatgattttaatagattcattactgtcttattccacaacccatggagtaaaacgcccgcaaaagcgggcgctggaaagtggcgatagtctaccgggttcgcaatgaattactactgtcagttgttacaaccagttattcgctcatcgcctcgcgccagagcttttccacgatccgctgggccaaaagcgcctgctcgccggcggtttccggaaccgtctgattttgcacgcattcaatgaagtgccgcgcgcagccgtcgaatccgcgctgctcaagcgttgtctgccagccgggcgccgggcgctgcaagattccgctgccccgctcttcacgccactcgcgcatatcgctcacctcatacagtccaccatcggtcaccgcctgcacccactcacgctggcttccggcgcgacgatgcatgctggtcgtgatctgcagttgccccgcgctgaagtgatgctcggcgtagagcatttccccttgagaagtggtttgcagaaccccgccgtccacccgcgtcttatctcccgccagccacaacgcggtatcgacaacatgcagataatcatccagcagggtaaagcgcagctctttgcccacgctatcgctacggtgcttatccatgcgcaatgacgccgcgtcattgagatgcgctttcaattcacgatacaacggtgcaaagcggcgattgaagcccaccattaacgttaaacgccgacgtgccgccagttcaaccagtgattcggcttcgctgagcttatccgccagcggcttgtccacgcaaacatgaactcctgcattcagcagatgatgaaccacttcataatgtgaagcggttgaggtgtggacaaataccgcatcacattgcgccgccagcgcatccagagactcggcatagggcagacgccaggtttcgcagatgcgtaacgctttctcttttcctggcgaccaggcggcctgcagcgtccagccatcagcggcgcccagcaccggcagccatgccttttgcgcaatgccgccaagtcccaccacgccaacacgtaatttcgccgtcacggttactctcctaaatgagccagtagtgaatcaaggcgtactttgagctcagcgacttcactttccagcgcctcaacgcgcgcctgcaaatcgtcattcggcggcgacaccgcctcgaccacggtgatgagcgaatccatgtcatcacaaaacaggtgcatatagcggctttcgcgtttacccggctcgcgcggaaggcgcgcgacgtaaggaccatcttcacgactggccaaattgtcgagcgtgctttccagctctgccatatcgcggaattcatacatccgctgcgcgcggctacgcagctcgcctggcgtttgcgcgccgcgcagcagcagcgtcgtgacaatggcgacttccgccgccgttaatttgagatcgccaaattcagaattgcagaagcgctgttcatatttggtcacccggttgccaaaaccgcttaccgtacgtaggtagtggcgtttgaccagctcatccagcaaatcctggacgtcgctttccgccagcgacatcaccggctcacggttggttttctggttacaggcggtaaccactgcattcactgatagcggatattgttccggcgtggtcacctgcttctccagtaggcaaccaatgatgcgcgcttcatgtgcggttagctgatatttcatgttgtctccttaacgccctggggtccagtcggtggccgttaacgccgtcaatacgtgatctcgccattgtccatcaatgaggaggtagtcctttgcgtaaccctctttttcgaacccgagccgggcgagcagatcgccgctgcgtttgttatgcggcatataattggccatgatacggtgaatatgctgcgtacgctgcatatagcgaatcgccgcggtcagcgcttcaaacatcagcccctgcccttgccacttttcaccaattgaatagccgagataacaggcatgaaatgaaccacgcaccacgtttgagaaattcgctacgccaataatctctttctcatcaggatcgagtagcgcgaaataaaaagccgaaccctgtttatgaaactccgtaatcatcgataatcgcgcctgccagccggagggataacagtggctttcatcgcgcaccggctcccagggtttcaggaaccctttattttccgcgtagtaatcggccagacgccaggcgtcacgatcgtgaaccagccgcaccaccagccggtccgtcgtcaaacgcaccttgggtacgttactgcgatagccaaacattcctcactcctgttccctgccccaaactgatatctttcactataccttccctgagtgaaggtgtgaaaacagcaacataccattttctgcaccatctccatttttcgatgaatagcctcaatcgatcttgctttttgataaaaaatattgtcgccagtatgctgggaaaataaccgccgcccccgcagaatatctaagcttaactttctttttccctggaggggaaatgtcccgcgtatcgcaggcaaggagcctgggtaaatatttccttttagtcgataacatgctggttgttctcggcttttttgtcgtttttccactgatatcgatccgttttgtcgaccaaatgggctgggcggcgctgatggtcggtattgccctcggtctacgtcagcttgtgcaacaaggtttaggcatcttcggtggggcaattgccgatcgtttcggcgccaaaccgatgattgtcaccggcatgctgatgcgcgccggcggtttcgcggcgatggccgtcgcccatgagccctgggtgctctggctctcatgcattttgtccggtctcggcggcaccctgttcgacccgccgcgagcggcgctggtggtcaaattggtgcgcccgcatcaacgcggccgcttcttctctatcctgatgatgcaggatagcgctggcgcggtaataggcgccctgctgggcagttggctattacaatacgatttccgtctggtgtgcagcgcaggggcggcgctttttattgcctgtgccgcgtttaacgcctggtatctgccggcatggaaactctcgacggtcaaaacgccgatccgcgaaggtctggggctggtgttacgcgataaacgctttgtgacctacgtgctaaccctgaccggttactacatgttggccgtgcaggtgatgctcatgctgccgatcatggttaacgatattgcgggctctccggcggcggtgaaatggatgtatgccatcgaggcgacaatctccctgacgctgctgtacccgatcgcccgctggagcgaaaaacgttttcgtcttgagcatcgcctgatggcgggtttgctggtgatgacggtggcgatgctgccgattggcttaaccagtacgctacaacagttgtttaccttaatctgtatcttctatatcggctcaatcattgccgaacctgcgcgcgaaacgctgggcgcttcgctggccgatgcccgcgctcgcggcagctatatgggtttcagtcgccttggtctggcatttggcggcgcgttggggtatgccggcggcggctggttgtttgatgcgggtaaaatgctcagccaaccggagttgccgtggctgatgctgggcattatcggctttgcaactttcattgcgctatggtggcagtttagccagaaacggtcggcttccggcatgctggaaccgcgcacctgacaatcagccaaagtggtaatcctttttttcagcattttccgctagtacaagcggggctagcagaccatgctgctttgtgtcaggattagctatggcatgacgttaaggaacccaatgaaaaagatgttgatcgcggccgcgctgattgtcagcggccttctgagcggatgtaaccagctaacgcaatactccgttagcgagcaggaaattaaccaggcgctgcagaaacgtaatcacttcgccaaggatatcggcctgcctggcgtagcggatgcgcacattgagctgcaaaacctgaccagcgccattggccgtgaagagccgaacaaagtggcgctgagtggaaccgccaatctggatctgaattcgctgtttggcaatcagaaagcgaccatcgacctgaagctcaaagcgctgccggtattcaataaagagcaaggcgcgatttatctgcgtgaaatggaagtcgtcgatgcgaaagttaagccggaaaagctcacctccgttgtacagacgctgatcccttatctgaatcagtcactgcgcagctatttcaaccagcaaccggcctacgttctgcgtgaagatgccagcactggcgaagccctggctaagaaatacgctaaaggcattgaagtgaaaccgggcgagatcatcatccccttcactgactaaacgataagggcgctgaatatggcgcccttaattttttacggaaatgagtgcaaaggaaaacgtttacgcttatccttagtgcccggcaaaaaacagccctgatgactgaaccaattagccggagccttccatgacagcacaaccccaggtattgaaaatccgccgccctgacgactggcatatccatctacgcgatgatgatatgttgaaaaccgtcgtgccttacaccagtgagttttatggccgggcgatcgtgatgccgaatctggtaccgccggtaacgaccgtcgctgctgccattgcttaccgccagcgcatcatcgatgcgattcccgccgggcatgatttcactccgctgatgacctgctacctgaccgacacgctcgatccggacgaactggagcgcggattccgtgaaggcgtatttaccgcagccaaactctacccggcaaacgccaccaccaactctagtcacggcgtgaccagcaccgatgccattatgccggtgctggaacggatggaaaaactgggcatgccgctactggtacacggcgaagttacccatgctgatatcgatatcttcgatcgcgaagcacgctttatcgagacggtgatggagccgctgcgcaaacggctgcaggggttaaaagtggtcttcgaacatatcaccaccaaagatgccgctgaatacgtgcgcgacggtaacgaactgctggccgccaccatcacgccgcagcatctgatgtttaaccgcaaccatatgctggttggcggtattcgcccgcatctatattgcctgccgatcctcaagcgcaatgtccaccagcaggcgctgcgtgaactggtcgccagcgggttcagccgcgcattcctcggcaccgactccgctccacacgcgcgccaccgtaaagaggccagctgcggctgcgcgggctgtttcaatgcccccaccgcgctcggtagttacgccaccgtctttgaggagatgaatgcgcttgaacattttgaggctttctgctcattgaatggcccgcgtttctacggcctgccggtgaatgaaagctacgttgaactggtacgcgaagagagtacggtcgccgaaagcatcgcccttcctggtgatacgctgataccgttcctggctggcgaaaccgtgcgttggacgatgaaaaaataaagttttttgcctcctgttgtaaatgcgcaagcgttactgtataaataaacagtatattacccagggggccattatgcgcatcgaagtgtcaattgccaaaaccacagccttacccagcggcgcgctggaagcgctgaataacgaactcactaagcgtatcgctcaatattacccggaacgtgaaaaccaggtcacggtacgttatgccgccggcaataatttgtctgtcatcggtggcttgaaagaagacaaagaccggattagcgaaatcctgcaggaaacctgggaaagcgccgacgactggtttatccacgactaagcctccgggtttgcttacgcaaaatcaatttgctccctcattgtgcttttttttgccgggtcgccccggcttttttatctccgcttataactaagattttccttaatatcccgattaattccttaaaaaataatgagacccaggatgaaatccgcgcaaaaaaccaccactcagcgcaaaatttgtctctaattatttattttctcgagtttgcacttaactactgatataattaacttgcttcagaaaacaagcattaaacctcgagaattgttgtcttttaacatatgaataagggttatgatggaaaagaataatgaagtcatccagacccatcccctcgtcggatgggacatcagcaccgttgatagctacgatgcgctgatgttgcgcctgcactaccaaaaccccacccaagaaagcgataaagaagcagaaattggccagacgctatggctaacgacggacgtcgcacgtcagtttatttctattctggaagcaggaatagcaaagatagaatctggcgattaccaggcaaatgagtatcgcagacattagcatcaccgatgatgtctaatattcactgaacaggcacccgcgggtgcctgaattattttcgcgcttgtacatccggctgatgttaattaacctgctaataaaacaataacccggaactcaccatgcaatacgacctcatcattatcggtagcggctccgttggcgctgccgctggctattacgcccgccgcgccggtctgaatgtcctgatgaccgatgcccacaaaccgccgcacctggaaggcagccaccatggcaacacgcgtctgatccgtcatgcctatggcgagggcgaaaaatacgtaccgttggtgctacgcgcccagcagctatgggacgaattcgcgcaagacagcggcgaggccgtattcgaaaaaaccggagtcattaacctgggccccgccagctccgattttctcaataacgtggcacacagcgcgcgtcagtttaagcttaacgtggaagaactggatgctgcggcagtcatgaaacgttggcctgagattcgtattcctcaagattatcgggcaatttttgagccagcttccggcgtgttacgcagcgaactggcggttgaaacctggatccggctggcgcgtgaggcgggctgtgcccagctcttcaactgtccggttaccgcgatccatcatcatgccgatggcgtgacaatcgataccgccgatggtagctacaacggcaaaaaactgctgatcagcgccggaacctgggtgacgaaattattgcctgaacttcccattcaaccggtacgtaaagtcttcgcctggttccaggccgatggtcgctatagcacgaaaaataacttccctgctttcaccggcgaactacccaatggcgatcagtattatggcttcccggcggaagacaacgaattgaagatcggcaaacacaatggcggccagctgatttccgagccgggagagcggaaaccgtttggcgccgtcgccagcgatgggtctgagtcgttcaacttcctgcgcaacgtgctgcccggaattggcggctgcctgcacggcgcctcctgtacgtacgataatacggtagatgaagatttcattattgatacccttcccgatcatgacagcacattagtcattaccggattaagcggtcacggtttcaagtttgctccagtacttggtgaaattgcgacgcaatttgcgcaaggcgaaacgacggagtttgatctaactcccttctcgctggcgcgattttcacaataatagccagccataaaacaaacggcctcaatcgaggccgtttcatatcagagagcgtgtatgcgtcgcctgtatcactggttagtcaacaacgtgcgcgagcactttatgatttatctcgcgctgtggctgctgctagcagtaatcgacctcatctggttatggttttactgacgggtcgggatccgggatacctaatttggtattaagacggccacgggatttattgaaaatcttattgccattctctcgccccgcccgcagtttgcgctgctcttcttccggcagtttatgctcttccatacaggcttcgctgcagcaaccggcaaatttctcggcacaagccgggcactgaataaacagcaaatggcatccgtcgttcaggcaatttgtgtggctgtcgcacggtgcgccgcattgatggcagtgggcaatcacatcatcagaaatacgctcgcccattctttcgtcaaagacaaagttcttaccgataaagcgtaccggcaatccctgttcacgggcgcggcgcgcatactcgataatcccgccttcaatgtgccataccttattgaaaccgctatgcttcatccaggcgctggccttctcacagcgaattcctccggtacagtacatgacaatcttcttgtctttgtactcctgcatcatctcaaccgctttcggcaattgatcgcggaaggtatccgccggaatttccatcgcgttctcaaaatgaccgacttcgtactcataatggttacgcatatcgatgaataccgcgtccggatcgtccagcatcgcgttcacttccgccgctttcagatactcgcccacatcagagggatcaaaggtcgggtcatcaataccgtcggccacaatgcggtcgcggaccttgaggcgcaggacccaaaaggatttaccgtcatcatccagcgcgatgttcaaacgtaaccccttcagcgccggatcgaagctatcgagaaattcacgcagcgccgcgaccttgctttccggcacgctgatctgcgcattgataccttcatgggccagatagatgcggccaaagacattcagcttagtcaacgccagccacagagcgtcgcgggtcgctttcgggtcaacgatagtgaaatatttatagaacgagatcgtcgtgcgcggctcggtttcagccagcatctgcgcctttaacgtctcatttgaaatgcggttgtgtaacactggcatggtgtacctgctcgacataggaaatgagtaaaataaacggcgggcatcatatagcaaacaccgttaatttacatccctacattttacgctacatttcatccacgcaattttcagccgttaacaatcagcttcagccggagactgcttttggcggtagcggaaaaaaatgcgataatagaacgcgttgtttaatcagacaggtatgaaatgacccatttaccgaaattttccgccgcgctgctccatccgcgctactggctgctttggctgggcataggcctgttgtggttagttgtccaactcccttatccggttatctaccgtctcggtaatgccattggtcgtctggcgatgcgttttatgaaacgccgcgcaaaaatcgcttatcgtaatcttgagctctgctttcctgagaagagcgagcaggagcgtcatcaactggtagttcaaaacttcgagtccgtcggcatgggtctgatggaaaccgggatggcatggttctggccaacccgacgcattgcgcgctggacagacaccatcggctttgaacatgtccgcgacgtgcaggcacaaaaccgcggtatcctgctgattggcattcatttcctgactctggaaatgggtgcgcgcatgttcggtatgaaccaacctggtatcggcgtctatcgcccgaatgacaacccggttatcgactggctgcagacctggggccgcctgcgttccaacaaagatatgattgaccgtaaagatctcaaaggcatgatccgcgcgctgaaaaaaggcgaagtggtctggtatgccccggaccatgactacggcccgaccgccagcgtcttcgcccccctgttcgccgtcgagcaggccgccaccacttccgggacctggatgctggcgaaaatgtccaaagcgtgcattgtgccattcgtcccacggcgcaaaccgaatggcaaaggctatgagctcatcatgctgccgccggaatgcgatccgcctctggaaaacgcagaaaccaccgccgcgtggatgaacaaaatcgtcgaacagtgcattttgatggcgccagagcaatatatgtggctgcatcgccgctttaaaacccgtccggaaggcgtgccttcgcgctactgattgactcactatccgggcggttctctgcccggataaattctaccgccagtcctcttaaatactcctttagctttaaaagctatgctccattgcgacaaccatttctcaggcgcataattagcaggctcatattttcctttattttgacccgcgccgcgggccagtgagaccttatgtcgtctgctgatacacctattaactggaaacgaaatcttaccgtcacctggcttggctgctttttaaccggcgccgcctttagcctcgtgatgccttttttgccgctctacgtcgaacagttgggcgtcaccggccatagcgcgctgaatatgtggtcagggctggtctttagcataaccttcctcttttccgccgttgcctcgccgttctggggcggattagccgaccgtaaagggcgtaagattatgctgctgcgttcggcgctggggatggctatcgtcatgatgctgatgggcatggcgcagaacatttggcaattcctgatcctgcgcgcgctgctggggttactgggcgggtttattcccaatgccaatgcgctgatcgccacccagatccccgtcagaaaagcggctgggcgctaggaacgctttcaaccggcgcggtaagcggtgccctgctcggcccgctggctggcggtttccttgccgaccactgggggttgcgcaccgtcttctttatgaccgccacggtgctgtttatctgcttcctgttcaccctgtttttaatccgcgaaaactttgttccggtgaacaaaaaagagatgctcaatgccagggacgttttcggttcgcttaagaatcctaaactggtgctgagcttgttcgtcacctcattgattatccaggtcgctaccggctccattgcgccgatcctgacgctctacgtgcgcgacctggcaggtaacgtcagtaatatcgcctttattagcggcatgattgcttccgtacccggcattgccgccctattgagcgcgccacgtttaggcaagctcggcgatcgcattgggccggaaaagatcctgatagttgctctggttatctccgtgctattgctaatcccaatgtcattcgttcagacgccgctacagctaggcattctgcgctttttgctcggcgccgcagacggcgcgctgttacccgccgtacaaactctgctggtgtacaactccactagccagatttcgggacgtatcttcagctataaccagtcgtttcgcgacatcggcaacgtcaccggcccgttaatcggcgcctcggtctcggccaactacggcttccgcgccgtgttcctcgtcaccgcctgcgtcgtcctgtttaacgctttttactcgaccatcagtctgcgccgcccacggcacaacgcttcagcagatgacgggagcacgggtaaacgttcggtaaattaagtgcttctgcgcttctctgccttgacgccagactaaccgccttctatagattgaaacgtgttcctttttcattcttcttagggggttagctatgtcaacggaatcagttttctacgccacgctcgaagaggcaatcgatgccgcccgggaagagttcctggctgataatcccgacagcgatgaagaaactgccgatatcgaacagttcaatatgcagaagtacattctccaggatggcgatatcgcctggcgggctgaattcttcgccagcgaagatgaagaaggcgagtgcctgcccatgctcagtggtgaagcggcacagagcgtatttgacggcgattatgacgaaatcgagctacgccaggagtgggtggaagaaaatacgctacacgaatgggatgaaggcgagtttcagctggagccttccctggataccgaagaagggcagaccgcagccgatgagtgggacgagcgttaattactcatagggaccatgactggcgtctagcggtagcaacagcgtatcaaataccagcgagaatggcagatcgagaatggtcagatagcgccaggctgaatcgcgaacatcccactgtacgccggggtaatactgattaccatggccctgccccggtaccgtacggctaattatgctgccgcagccgctgagtaccagcgtcatggcgataagcagaaatattctcattcacttcctctcaggcaaaaaaataccggcacaatcgccggtattttccttaacgtacggcttacttcgttttcaacgccagcgggttcagcgtgagctgctgatacgccccacccaggaggagtatttctccggggagttccacacgcgatagtgcagacgcgacatcgttaccggatcgcttaacagcaccagtcgacgatcgcggttgagtttatcaggcgtttcattcagcgcctgctcaacgtggcgttcacgggcgatatccagaatacggccgtggcggtgacgcgccgttgccattgccgtcgccagagcgttgaacgatgggttaaacaccgcgtgcataaagccatcgcccagcgaacgctgacggttcaaagtcaggtaagcatcggtatctttcagtacctgtggcggcgaatactcttccgggatcaggaacaatttccagcgtttagtgcgcagacctaccgtcgcgcggctggaaatcgccgagacaaacggagagaggatcagcgacacgacgataggcgccagccagaacaggaaacgcagatccagccacgccatgccaaccgcccaaaccagccccagcaacagctgcgaaccgtgacgcataaaagcctcgccccacggtgttgagtcatcatcgcgctgcggtgagttccacaccacctcccaaccgaggaacgcgctgaccacgaacacggtatggaacagcatgcgtaccggagccaacagcaccgagaacagtacctccagcaacagggaaagcgtcacgcggaagaagccgccatactctttcggccccttgcaccacaccagaatgatactcagcagtttcggcaggaacagcagtaccatggtcgaggcaaacagcgcgatagccagttccggacgccactgtggccataccgggaacagctgacgcggctgcaggaagtattgcggctcggtcagggcgtgcacgacctgtagcgctgtcgacagcgcgaggaacataaaccacagcggcgccgacagataggacatgacaccggtcaggaacaccgcacggtgaaccgggtgcatccctttcaccaggaacaggcggaagttcatcaggttaccctgacaccagcggcggtcacgcttcagttcatccagcaggttcggcggcagctcttcataggagcccggcagatcgtaggcgatccaaacgccccagcccgcccggcgcatcagcgcggcttctacgaagtcatgcgacagaatcgagccggcaaagttaccttcgcccggcagcggcgccagcgcgcagtgttcgatgaacggcttcacgcggataatggcgttgtgaccccagtagtgcgattcacctaactgccagaagtgcagcccggcggtaaacagcgggccgtacacgcgggtggcgaactgctggcagcgcgcataaagggtatccataccggaagcgcgcggcgaagactggatgatcccggcattcggattcgcttccatcaggcgcaccagcccgctcaggcactcgccggtcatcactgagtcagcgtcgagcaccaccatgtagctatactggctaccccagcgacggcagaaatcatcgatgttgccgcttttacgcttcacacgacgacgacggcgacgatagaagatctggccttcaccctgcacttcggcaatcaactccatccacgctttttgctcggcaacgcaaatatccgggtcgtagctgtcactaagcacgtaaacgtcaaaatgcgcagcgttacccgtcgctttcaccgattcccaggtggcgcgcaggccggcaaacacgcggtcaacatcttcattacagataggcatgataagcgctgtacggtgttccgggttcagcggctcgtcgccaacggtggatgccgaaatactgtacttatcacgcccgatcagcaattgcaggaagcccatcagcgcggtccagaaaccggccgagacccaacagaaaagtaccgcaaagaggatcaggatgccggtctgcaacacgtaagggagtagctgcatgaaggagacccacagatcctggccaaccatatcggatggattgatcagcgcccagccctgataagggaggatggtcttcatataccaggtggccactaccgtttgcgccagcgtcagcagcagcaaaatgtagcgacgaatggtgccgacggtacgccatttctgttcgctttcacgctcttcttgcgtgaggcgagagagatagcgcggagtcacgtcacggccacgcaggcgatcccagaagcggcctaccgggttggtacgccacgggtcggggatcattgaggaacgtttcgctttcggcatcgcatgaagctgcgtacgcccttcatcatctttcaccagctgatcgccggacagagagtccggccagctatgctccagccgcgcttttaccgatcctaacggggaatcttcatcacgcggaaaatgatgatgctctgcgtcaagcgcttcatgcacggcttgcaggctcgcatctggtaatgcggccttttctgcatccgacagcggcaatgcgtcgatataattcgttatcttattcattggcaggcagctgatagctccaggtttcgctcagcgtctgatcgccattgaccagcgccgcacgcatttccgtggttttcttcggatctttcactttcacgcgcagggtcatacgccaacctttgataaccgggttatagcgcacggagttttccacgatttcggcattatcgccgatgctcgcctgcgccgttaccggggtgtccgccgccatttttttcatgtcagcgccggtgaaatcaacgatgaaagcgatagtgccatctggctggcgaatgaggttagactgcttcacatcaccggttgagcggcgagtctgcaccacataagcgctgtctggcgcatgcagcttgtcttcatcgcggctgaaggtaatggagtatttgaagttcatctctttgcccggttctggcagctgatccggggtccagtaggtgacgatattgtcgttggtttcatcgttggtcggaatttcaaccagttcgactttacctttaccccagtcgcctttcggggtgatccacgcgctcgggcgctggtcgtaacgatcgtcgagatcttcaaagcgggagaactggcggccacgctgcagcaggccaaacccttgcgggttttccatcgcataactgctgacggccagatgtttcggattattcagcggacgccagatccactcgccgttaccggcaagaatcgacagaccgttggagtcatgtagttccggacgatagttagtcgtcggcgacggctggttcggcccaaacaggaacatactggtcaacggcgccacgcccagtttgccgactttgtcgcgcagatacaccttcgactgcacatcaaccacggtgtcgcgcccaggcataaccacaaaacgataggcgccggtcgcacgcggggaatccagcagcgcatagatagttaagcgcttatcggtcgctttcgggcgctcaatccagaactcgcggaaacgaggaaactcttcgcctgacggcagcgcggtatcgatagccaggccgcgggcggaaagcccgtatacctgaccctggccaagaacgcggaagtagctggctccgagcatgctgacgatttcgtcattcttgtctttgctattgatcggatacagtactttaaaaccggcgaaaccaaggtctttcaccgtgtctttatcgtgttgcacattgccaaaattaaaataatccgggctatatttaattttacgtacgctggtgctggtcacctcattaatagtaaccggcgtgtcgaaatacatgccctggtggtaaaattccagcttgaatggggtcttcaggttattccagtaggctttatcgtgattgaactggatttgctggtaatccgcgtatttcatatcgcggaaggcggagggcaggttacttttcggcgcttcatagcctttcccggctaacgttttcgcctgttttgctacgtcatcaatgctgaatgcccatgcagatgaagtacacagggacaacattacggctgcgcttaaccaacgcattttcatcatctgtggtttatgtttcatagtaagtaagcacttccccctttgtgtgcttaaatcgatccgatctattttaatggaaactcaggcaatccgacaacataatccctgcattgttcagcttagcggaccagggaataaacagttctctgtcccatattgcactttgcgtacttatcctggagacagataccctgagttcatgtagggttgctgggaatgtaaccgttatcgccacaagtgataagacgaattgtctgagattgttgtgaatttatgaataaaacaccagtagagcgtgaatatttcttcgatagcatccgcgcctggctgatgctgctggggataccctttcacatttcgcttatctactccagccacagctggcatgtgaatagcctggagccctcctgggggttaacgctgttcaacgactttatccatgctttccgcatgcaggtcttctttgttatttccggctacttctcttacatgctgtttcttcgctatcccctaaagaaatggtggaaagtacgcgtagagcgcgttggcattccgatgctcaccgcgattccacttctgactttgccgcagttcctgatgctgcaatacgttaatggtaaagcgcaaaactggcacacgctctccggctatgacaaattcaacaccctggcatgggagcttatctctcatctgtggttcctgctggtgctggtcgtgctgaccactctcggcgtggtgctgtttaagtggctggccaatcgagggaaaacgcagaccgccagctttggtgacactgtcacatttggtcaattatcgcttattttccttgggcttggcgtgttgtatgcggtaattcgtcgcactatttttatcgtttacccgccgattctcagcaacggactgtttaacttcatcgttatgcagaccctgttctatctgccgttctttgttctcggcgcgcagacgttcatcaacccgcggctaaaagcgatgttcaccacctcatcaccctggtgttttgtcggcgcactgctgggctttatcgcctatcgtcttaaccagcagtatggttccggcgatggctggatgtatgaaaccgaatcggtgattaccatggtgctggggctgtggatggtgaacgtggtattctcgctgggccaccgcctgctcaacttccagtccgctcgggtgacttacttcgtcaacgcctcgctgtttatctacctggtgcatcatccctcaccctgctgtacggggcgtggattacgccgataataaaatcgaatctgttaggttttatcgccggactggtgtttgtggtgggtattgcgctggtgctgtacgaaatccatctacgtattccgctgctgcgcttcctgttctcaggcaaaccgcagcaaaaaccggcgaaagcgccggtgtcggttaactaaaatccacaaccggcagcgcgcctgcgtgctgccggtgccgcgattcattctgcctgcaataatcgctgatagatctccgccgtttcgttatcaaagcagacgaagcacactcgttccagtggattatatcgggtgaggaaagccttcaccgttttcaccgcaatttccgccgccgcctgtttcggatagccatatacgccggtgctgatagccggaaaagcaatagaacgataattattggctgccgccagcaacagactattgcgataggcatccgtcagtaattcggcctcttgctcgtcaccgccatgccagacggggccgactgcatgaatcaccgcgctggccggtaagttaccggcgctggtgataaccgcatgcccgggcggacattcgccctgctgctgacggactattttgcaggctgccagtagttccgggcccgctgcgcgatgaatggcgccatcaacaccgccgccgcccagtaacgatgggtttgccgcgttgacaataacatctacctgcaacgtcgtgatatcgccgagaaccacctcaggttgaacaaccatttcccctcctgtcggcaaacgtcttcatacttagcgtggtgtctactatggcatgatagccccaaggcggaagcctgagggccagtaattagcgataattcacttcgaggatagcgcgggtatgttgcggatcaatatactttaattgtgctgaacggacggcgtcattgctgtaatttcccgtcgtcagcacctggggcgaaagcgcccgggtaggcagttgctggcaggccatttcaatcttttcgcccacactattggcttcgcaggacggatcgacgacctgcccataaatggcgacaacgccgtcggtcggcgcggcgtgcactgctccaaaccagcacgacaacatcagacatggcatcgcgaaggcgtggattttttttatcacggcagtctcctctgtttaatagcaaagaagcaacaggccatccatgagcgcactgcgccgccagaatacggcaaggcaatgattgcgttatggaatacaaatatattactttttgttttctttttgttaacaaaatcgattcatcttgattttgctacaaaaaagcggcgtgagaatgtcaggagagaggcgtggcaaaagcccccgcaggatctgcaggggcctgctattaccgataactcacttcgagaatcgcgttggtgtgctggggattgataaaggtgaactgtgtagatttgatattgtcatgttgcagatcccctcgggccacctgctgggcagaaaaagtgactgacttctgcttagcgcaagccatcgagacctgatcttctgaagagcgaattttacaaggcggttcgacaacgccgccgtggaaacgaatcacgccgcttgcggcgttagaggtagttgaaaaagtcaataaagcgggaaggaaacaaactgtagcaagtagtacgccagtcatttttttcacggcaaaccccctctgcgtaacggtcaaaaaaaccttacaaatcatccatgagcgcagttgaatacaagcaactacatacaaaatcagtatatatatgaagtacctgttgatacttttttctctccgtttttgcaaacggtatcaaattattatggtttgtttgctcaaaatgtctgcattaagaggaaaaaacaatcgaagaggggttgatgcaaaaaggctttcatgtagtgagtgacgggaagcttgctcccgtcatcgaggaaatgtgaagaaaatcagacgttatcgttagccaaagatttattctttgccgctcgcgccgccagccacagcccgctgtttttcatggcatagccaaagaccaatcccaacgccagtgacggcacgacaacgcgccagtcgccgctcgcggcaaatgtcgcgcaggcgccaataaaggttccgggaacaaaagagagcagcagctgacgcgcctgaatacacatcagaaaggcgactattccggtcatcacatagctgaggatttccagctgcggcgcaagcgcgctaccgtaaataatcaccagcgcccatatcacgccgctcatgaccgtgcaggcggaaatcaacagccctttcaggccgccctgtgggcaagcgaaataggccgtacagccgaggaaaccggcccagctcagcaggccaagtgagaccgccacccatccccaaataccggagagaatgcccgtcgtgagtgcgattgcgaagagtatgttcatgccgcgtatcatagcagatacgcggcaaccaaatgcgatccaggacacacaatatgaatacgtgagtttgctgtttcacaccaagagtgacttacatcacaattattcgtcgttttcttcctgtagctcatcccacattgcggatatagcttcacgcgtgagtagcgccatggtacgccagaatgcggtttgcgcatgcgcctcgactttcccgaggaaggtaccgcaccacggtaagagataatcggcaaacaacgtttccaacgtttcgctttcgtcatctgaagcatgatcttcaagccaggatgcggccagcagtagggatccaatatgatcggttggcccatcgccagtgggaataccgtgttgagtaagaaaaccgcgtacttccgcttccgtggctccttcaacccacgcgctgcgataaggcgagaccgcgcattcgtcaccaacgaacagggcgttgtaatcagcggttaacggctgggtatcacaactcttctgcagacgctccagtaattcatcctgttccagcggccaactggcggccagcttgccatcgcgaatcagcgtgaacagcggcaccaacagcgggtcctgcggttggcgataatacagcgagcccagcacgcgacagaggattgaaaattcattcatacaatatgttccagtggttcaaattaaaggtctgcaaattccgcaatcgccggcattccgcgtgattcgaggaaattcagtagtcgacgcggactgacgttcaggatccgctcttccgggaaattcaccgcgtcgaggattttgcggcattcggtaaattcgccaagcgtaaaggcggtatgcgagtctgagcccagcgccacccaaccacccgcatcacgcacggcggcggcgattgcccggcaattatcttcactaccgatacgcgatgaaaggaaagaggaattattaatttccagcgccacatgatgctttgccgctgcttcggctactgccggaatatcgatcgggaatttcggattgcctggatggctaatcatgtggactgcgccactggcaatcgcggcaatcatcgcttcagtgtgggtggctttatcctgaggcgggaataccggctcatgaaaaccggcaataatcagatccagcgaggtcagcattggtccggtacagtcaatttcaccctgggtatttttaatattcgcttcaatgccgcgcaggatgccgacgccatctaccagacgcggccagatacgcatattgacgaaatgccagtagtgcggggcatcggccatatccgggccgtgatcggtgatggcaaaaagtttaatgcctttacgtttggcctcggcaatatagtcatgcagggtactataggcgtgggtgctggcgacggtatgcatgtgcaggtcaacaggatacatcacaatctcctcctctatttgtggcaagaatagcaggaatcaggagtcatgatcagtaaaaaccccgccgtagcggggttatcgattagtagccgcgttggcggtcgacctgcccgctgaccgtttcaccacgctccaggtggctaatggtgctggcaatataagcgatcgcttcctgtggacgggtaacggcggcaatatgcggcgtcatggccacacgtggatgcgcccacagcgggctctctttcggcagcggttcgcggctaaagacgtccagcatcgcccctttcaccttaccgctatcaagcgcggccagtaaatccggctcgacgatatgtacgccgcgggcgaggttcaggacatagctgttatccggaagttgagaaagtaaggtttcattaatgatgccgacggtttcagccgtatttggtaacaggttgatcagcacgcgtgtttctcgtagaaacgcgcccagttcttcctgaccggcaaaactttgtacctgcggccaggatttgtggctacggctccagcagcgcactgggaaaccccagcgcaacaggctttccgcgactttgccgcccaacacccctgcccccataatgccgatagtgaaatccccgcgacggtattccggcaacggttgccagcgggattgcagcttcagcgcctgataatcatcaaaacggcggaaccagtgcagtacctggcttaccgcatattcctgcatctgcaggcccataccggtatcttcgaggcggaacagcgggatcgaaagcggcagcatttccggatgctcccgcagcttgctaagaatagaatccacgcctgcaccgagggcaaaaaccgccttcaatttgcggccttgcaacatttctaccggtggatgccagaccagcgcatagtcggctggtcgattgtcgccaggtttccactcacgaacgcgcgctcccggcagatgtttttccagctctgcgatccagtaggggtatcgaacgtcgggtggtaaaaaataatctccataatgactcctgattactgacgcgtgagtaggttgaggtttgcgtcgtgttttactctttgttttgtattggtttgccagcataacaaattccgcatcgctattgagcaataaagagaatggcgacaaaaaaaacgattcccgcgcgtttaagaagcaagttgtttgaagtttggctaaacgcatctttttttaaaaaagttgattgacgggagatacgtatttccctacattagcgcccgttcccagcaacaacgggaaagacaatatggtgaggtgtccgagtggctgaaggagcacgcctggaaagtgtgtatacggcaacgtatcgggggttcgaatcccccctcaccgccatattttaagaagagctcgtacgaaagtacgggcttttttttcgcatgtggcacccgcagggggatgagaaccccgaccggggttcgacaactggcgcagccagttggacagaccgcgaacgcagtaagcgggctgccccgcaggggcgagcaaagcgagtcaatccccctcaccgccatattcgagataagagctcgtacgaaagtacgggcttttttcttttatattctccgttggggggatgagaaccccgaccggggtcggcataaatgcctcgcccggactacccataccacaggccccgccaccagtagcccgtccaggcgcagcgccgccgggaaaaagagcctaagttaatcctcttccatccgctgatactcttcgctgagataatccaccagcactctgacagaaggtaataaaccgcgccgcgaagcaaacaccgcatgaatgacttcccgccgcggctgccactcatcaagcacgatttccaactcccctgatgccaactgatcgcgcaccattaataaaggaagctgaaccacgccaacgcccgccatggccgcctcgcgcagcgccagcatatcgctggtcaccatccgcggcgtgaaataaacctcagcccgcgccccctctggcccggtcaattgccatttatgctgatgttttccggcgccaatacttagccccggccaggtgctcaattccgccggcgcctgcgggcgcccaagcctggctatcagcgccgggctcgccaccaggcgatggccgcgatcggccaacacccgcatgaccaggtcgctatcttcaaatggccttggtcgcacacgaatggccacatcaaccccctcgcccaccacatccacccgccgattggtggcttccagatgtagcgtcaccccaggatatcgcaccataaagcgcgccagcatcgggccaacatgggcatgcaacagggttaccggacaggtgagcttgacgctgccgcgcggttcagactgcagcgtttctaccgcctgatgcgccgcttcggcttctatcaacatcgccttgcagtgttgatagaaagtttggccgacttccgtgacggcgaactgtcgggtggttcgttgaatcagacgcacgcccaggcgctcttccagttgcgcaatgcgacggctgagtttggatttgggctggtcgagcgcccgaccggcagcggcaaaaccgccatggtcgaccacctgaacaaaccaggccaggtcgttgagatcctgcatccttttctccatcgttccatttttagaacagtataggtcattttcgctatctaccggaatattagccccagatataagcttattcacatcagatacagacacgcaggagataaccatgaaacagattactggcgtttacaccgccccttcgcagcactgggtgggcgacggtttcccggttcgctcaatgttttcttaccagacccacggcgaacaactgagcccgttcttactgcttgactacgccggcccgcacacgtttccggcgggaagcggtaaacgcggcgtcggcgagcatccgcatcgcggattcgaaaccgtcaccattgtctactccggtgaagtcgagcatcgcgactcaaccggtagaggcggcgttatcggccctggcgatgtgcagtggatgacggctggcgccgggatcctgcatgaagagttccactccgaagcgttcacccgctccggcggtgaactgaaaatgatgcagctgtgggtcaacctgccggcgaaagacaaaatgacgaccccgggctatcagagcattaccgcagacgtcattccgcaagcgacgctggaagacgatgccgggaccgtcagagtgattgccggacgttacgacgatatcgccggtccagcgcatacgttctcaccgttaaacgtgtgggatatgcagctcaaacaaagtcacgatgtgacattgcgtcagccggaaggctggagcaccgcgttggtcgtgctcgaaggcgaagtcaccgtcaacggtacggaaaacgcacgggaaggacagttggtagtgctgagccaaaaaggtgaagccttccatctggaagcgagctccaacgcgaaggttctgctgatggccggcgaaccgctacaggagccgatcgtgggctacggcccgtttgtgatgaataccaaaacgcaaattgccgaagcaattcgcgattttaacagcggccgttttggccaaatctaacgaaattgaggtgaagaatatgtctactccagctaactttaacggttctcgtccggtgattgatgttaacgataccgcgatgctgttgattgaccaccaaagcggcctgttccagaccgtcggcgatatgccgatgccggaactgcgcgctcgcgccgccgcgctggcgaaaatggcatcgcttgccgggatcccggtgatcaccaccgcttccgtgccgcagggtccgaacgggccgttgattccggaaattcatgagaatgcgccgcatgcgaagtatattgcgcgtaaaggcgagatcaacgcctgggacaacccggagtttgtcgcagcggtgaaagcgaccggacgtaaaaccttaatcatcgccggtaccattaccagcgtgtgcatggctttcccggcaattgccgccgtcgccgacggttataaagtgtttgccgttatcgatgcctccggtacctacagcaaaatggcgcaggagatcaccctggcccgcgtagtccaggccggcgtagtaccaatggataccgccgcggtagcctctgaactgcagcgcacctggaaccgtccggatgccgccgagtgggctgaggtgtataccaaagtcttcccggcgtatcagttgctgattgaaagctacagcaaggcgcaggacgttgtgaagaacaacgaaaagctggattcccagcgttaaaatagctgccccgtcgatgaatcgacggggcagtgttcattgcttaaccgaacggtaaagaaagaaaaaatatgcttgaccgttttagcgcaactccctatagtagcgccccgttgcccacccaaggtgagcagtaagacaatatggtgaggtgtccgagtggctgaaggagcacgcctggaaagtgtgtatacggcaacgtatcgggggttcgaatcccccctcaccgccatattcgagatgagagctcgtacgaaagtacgggcttttttcttttatattctccgttggggggatgagaaccccgaccggggttcgacaactggcgcagccagttggacagaccgcgaacgcagtaagcgggctgccccgcaggggcgagcgaagcgagtcaatcccccctcaccgccatattcgagatgagagctcgtacgaaagtacgggcttttttcgcatctgaccccggtaaacctccccgaggtcggcataaatgcctcgcccgggctacccatcccacaggctgcaccaccaccagtagcccggccaagcgcagcgccgccgggaatcccacaggccgcaccaccagtagcccgtccaggcgcagcgccgccggggaaatgttgcaaaaacaacaaagcccgggacatcccgggctttgcacactcactagcgtttagtaataggctttcaacgttcgctgacaaagcgttgaacgcacgcagtcatcggtggtaaagcgcacgatgccaatcatgtcgtcttcttcaaaacgcgacagcgcgtcactcaggcctgatttcacgccagagggcaaatcacactgggtaatatcaccgttgacgatcaccgtgacgttctccccgaggcgggtcaaaaacatcttcatttgcgccgcggtcacgttctgggcctcgtccagaatcaccaccgcattttcaaaggtgcgtccgcgcatataggcgaacggcgcgatttctaccttaccgatttccggacgcaggcagtattgcataaaggaagcgcccaaccgcttcaccagtacgtcatataccggtcggaaataaggagcgaatttttcggcgatatctcccggtaagaagccgagatcttcgtcggcctgcagaacgggacgggtaacaataattctgtccacatccttatggatcagggcttcagctgctttagccgcgctgatccaggtcttcccgcacccggcttcgccggtggcgaaaatcagctgtttattgtcgatggcattcaaataatgcgcctgagcttcattacgcgcttcaatcggcgaaagatcgcggctatcccgcgccatgccgattgcttctacgccactcatttgcacaagcgatgtgaccgattcttcttcacgttgtttatggctacgcgaatcccgtctcagcacacgttttgcctcacgacgagctttgatcactgctttttgtcttcccatggatagcaccttgcgttgttggtttacatcacgcgcgtcaagagcaacgcgattatgcgcacgaacgattgaggtttggcttccttgtaagccattgcttgccggttgaatggacaacgagtcgcggctacgcgcaccgcgtaccctgccagagttagcctgattaatagtggaagagattggggttacagagtgaaaatcgctgccggaagctgggcctccgtgctggaaagtacggtatgtggttttacgttgtccgctacaggaccttaccattcgcgatctccatagtgagcgacatcactgccgggaactaccgcgtatgtaataagtacatcaaaaattattcttaatgcaacttattttttacattgacgcaacaatggtttctaaactcattgtagaaaactatccgtcatttgtattacagaaatataacacatggcaggaaatatattgaatccgagaaaaacagcagaaaacgccctgccttcggcggcaggacgcgtatcaggcttgcaacagcgattgtccaagataatgctggtcattcatcacgccgggcagaacaaagaagtatccgccgccaatcggtttaacgtactcctccagggcctcgccgttcagccgtttctgcaccgtcaggaatcccttttccagatcgtgctgatagcaaacgaacaataaccccatatccagttgcccggagttggtgacccccaacgaatagctgtaaccgcggcgcatcatcaggctggactgcgtttccggcgtacgcgggttcgcaaggcgaatgtggctatcaagggcgatcacttcaccattcggatcgcgactataatccggaacatcatgttcatgtttcatccccaacggcgcgccagaatgtttatcgcgaccaaaaatcgtctgctgctctttcaacggcgtacgatcccagaactcaacgtggaactgaatgatacgtgcagcctggtaactgccgccgatcgcccaggccggttcgccctggtcggcagtaacccacaccacgttatccattagcgctttatcctggctcgacggattagcggtaccgtctttaaagcccagtaggttaataggcgtctctttgcctttgctacgggccgcgctatcagagataaacccttcccgcttccagcgcacgctcagcaggtcgggcgtgtgcttgataatgtcacgtagtgcgtggatcaccgtatcctgggtattggcgcaaatctgcagtagcagatcgccatggcacagtgcggcatccagcgaatcattcgggaaacgcgtcatcgcctgcagttttttaggcactttacccgctaacccaaagcgctcatcgaacagcgaatggccgactgagacagtgatagtcaggttatccggcgcaatccacggccctaaaatcccggaatccatcggcggcaatcgtggattcggggtatccggcgccggaccgcctgcggttaaaaaggcgatccgctgagtcagcaagcggaacaggcgttcgaggtcagctttatccgccgccagcacatcaaacgccaccagcatcattgaggcctgctgcggcgtcaggatgcccgcctgatgcgggccataaaatggctgtttttcctggcgcgcatcgggtgcaagcgtgccgggggagctttccgctttcgccgcctgcgccatcgggcaaccgccgctgatggccagcgcgccgccaagcgcgccgatccccttcagtaagcggcgacgtgacggttcattcacgtcgcgaggtttttgttgtgtcatcgaattaatccaggcccaaaattccgcgcagttgagccagatcttctgccagcgtcgtgatcggccctttcagcgcattacggtcagcggtggtaagcttgtcataggtctcgaaaccgtctttcgtgcggtatttagcgaggatggcatcaacttttttgaagttggcgtcaactttggccagcagcgcgctattatccttttgcagctgcgggcgcagcaggtcgacgattttctgtgcaccgtcgatattggcctggaagtcccacaggtcggtatggctgtagcgatcttcttcaccgctaattttgctggccgccacttcttcaatcagccctgccgcgccgcccaccactttcgacggcgggaaagccagctcgctaatgcgtttttgcagttccagcacatcgctgtttaactgttcagcatagttttccatccctttaacgctgttatcgccaaacagcgctttttccagacggtggaagccggtaaatttcggatcttcggcttttttctcgaaatcatcttcacgggcgtcaatgctgccgtcgaggtcagagaacagttcggcaatcggttcgatgcgctcgtagtgctgacgggtcggggcatacagcgccttcgctttatcgatatcgccagcttttacggcatcggtaaaggctttagtaccgctaaccagctgcgcggtttccgcggtgacgtaggctttatacgcagtaatcgcctcgccaagacttagcaccgcatcggctttcgccgcatctttgctggtttcaccggtgacaataagctttcctttcggattagtcagcaggccgcaggtcatatcgtattcgcccggctgcaggttagccgtcaatttttgcgtgaatcctggcgcgatattttcacgctcctcgaccaccattacccctttcaggatctcccactccagcgctttctggctgtggttctgaatgatgaactgtgttttccccgccttcaccgtcacattcatcggttcgcactgcttgtcgttgacggtgaccttcacctgcgggatatccgcagcctgagcgtaaaatgcggaactaaacagcgcggcgacggttaactgcagcgcagtacggcgaaaatgcattatcatggccatccctttcgaaaagtatgttgtaactatattgatcagcggcgcctgaattacgcggctcgcgatgctgtcgttttgctgcccggcggcaaggcaaaacacaccaaggccgggatcaaatagaggagataaaccgccacttcactgacggtaggcgtctcctggtaaccaaagatgccttccagcagcgtgccgaacagcgtgtgcgtcgataccacgttgctaagatcaaaggcgacattctggaagtaattccacaatcccgcctcatggaaggcgcgaatcgccccggctgccagaccggccgccaccagcaggataaacagactggtccatttgaagaacacgccgagattaaggcgaataccgccccagtaaagcaggaaacctaataccaccgccgtcgccaggccgagcatcgccccagcggcggccagatgcccacgtcctgctggaatgccgcgagcaggaaaaagaccgactccaggccttcgcgggcaaccgcaaaaaacaccatcatcaccagcgcccagccgtggttactaccgcgctgcagcgcgttatccaccgcctgctccagttgttgtttgacgttgcgtgacactttacgcatccagaacaccatccaggtgaggataaataccgcgatcaccgccacgatgccttcaaacagctcctgctcgcgctgcggaaattctccggtggtctcgttgataaaaatccccaacccgagacagagcgccgccgccaggaatacgccaatccacatgacgccgatccagttgccgcgctgggttcgttttaaatagctggcaatcaggctaacaatcagcgcggcttccagcccttcgcgtaacatgatgagaaatggaacaaacatgccgaaacccttaaatgtgaaccgcagtcaacggatgcaaagataggtaaatatttctgatagtgattatcattacaacaatgagaaacacaagcgaaatgttcagggaatgatgactagttgtaaattaatcgctacaaaatagtcacttgcgaaaatatctcaccagctaagcattaaaatggcaaatagcatgattttttatgtcacatatttaccgggccggagcgctgtggctaaatggcggtcctgatttatctgcgaaataaataacatgactcaaattttgcacttcctgctggcgctggcggttattctcgccctcgcctggcttgccagctatgaccgacaaaaaatccgcattcgctacattttgcagttaattattatagaaatcgccctggctttctttttccttcacgccgaaagcggtttatgggtagtgaaaaatatttcaggcttttttgcttcgttactcgggttcgccgctgaagggaccaatttcgtatttggcgggatgggtgaaaaagggctggcctttatttttctcggcgtactgtgtccgattgtctttatttccgcgctgataggtattctgcaacactggcgtattctgccgatctttattcgtctgatcggcaccctgctgtcgaaggtgaacggcatgggcaagctggaatcattcaatgccgtcagctcgctgatcctcggccagtcggaaaactttattgcttacaaaggcgtactcgggacctctcctcacgtcgcctgttcacgatggcggcgaccgccatgtcaacggtatcactgtcgatcgtcggcgcgtatatgactatgcttgatgcgaaatacgtggtggcggcgttgattcttaatatgttcagcacctttattgtgctttcaattattaatcctacacgccccggtagcgaagcagaaataaagctagaaaagatgcatgaatcgcagagcttctttgaaatgctgggtgaatatatcctggcaggctttaaggtcgcgatgattattctggcgatgctaatcggctttatcgccctgattagcgccgtcaattcgttatttgctaccgtcttcggcttaagcttccagcaaattctcggttacgtattttatccgctggcatggctggtgggtatcccattaagcgacgcgttaaatgccgggagtattatggccaccaaactggtcgctaacgaattcgtggcgatgatcgaactgcagaaaattgccgccagcatgacgccgcgcgggctagggatcctttccgtgttcctcgtctcgtttgccaacttcgcctccattggcattattgccggggcgattaaagggcttaacgagcagcaaggcaataccgtttcccgcttcggcctgcgtctggtctatggcgcgacgctggtgagcctgctgtcagccagttttgccggtctggtgctgtaacgtttcgggcggggagctccccgccctgttcgtcagaaatgtacacacaccggctgatcaacccgcataacggattcctgagcgaatcgcgccttataagtattacgcagcgcttcaatcccttcctcgcttttcgcatctttgctatgaatcagcattagcgccttgctggattcgcgggcgactgcgccattgttacctaaccactggccgcgggcgtcaaataccgtcaggccatcgcgaaaacgcggcgtcacatcacggtcgacaaactgctgccactcctgggcagtaatatctttccccgccggacggctaagaccgaaatagagggtggtttgcatcattctgttatccgcctgacagccgttattatcaacgcgcgcggcgcttttctcggatggcgccacgcatcctgccaatagtgcggcaaccatcagcgccgcagcgccctgggttaatttcatttgctatcctcattgttttttgtacacagatatcagcgtattttcagtgaattagcaagagatgcgcgaacattactctctggcgatacggcagattttcttttgttctacactgatacacacagcctgggcgaaattcttttttaaattatttcctgcgttttttatttcaaagacttctctatagttgagcgtttttaactggcctggcggccgcgtaaaataacaactggaataattcatgatagaaaataatgagttagctaatattgagaaaagaattgtcacccgctttctcgatatgtttattaagttcggcttgatactggcgctggcctccttctgctttaccgtcttctcgccgttcctgaacatgatgttgtgggcgctgattctggccgtcactctgtatcctttacatcagcacctcgcgcgacgtttaggcgggcgacagggactggcatcgaccatattagtgttattcggtctgttgattatcgtcatcccgaccattttcatggtgacctcgcttggcgaaagcgccggtagcctgattgataaagtcagcggcagtgacctgacgctgccgccgccttcggctaacgtcgcctctattcccctcgtcgggggtaagctgtacgcgttctggctgcaagcctctgcggacctcccggcggtactgagcagctatcacgcgcaaattggcgaggcggcaaaactggtgctcggcgtgctggcgagtatgggcggcgggctgctgggctttgtcctctcatttattgttgccggcgccatcatgacctggggcgcagctggcgccaacagcgccaaacgtatcgctattcgtatcaccgatgaaaataaaggtcttgccctgagccgcctgtgcaccggcactattcgcgccgtggcgcagggggttattggcgtggcgctgattcaggccttgctgacgggaattatcattgcgttggcggggatcccggccgcggggatcttcttcgtgctggcgctggtgctcggcatcgcgcaaatcccggtgatactggtcaccgccccggcgattgccattatgtggatgaccggcgaccacggcaccgcggtgaatgtcgtgtttaccgtcctgctgattgtcgcgggaatggtcgataacgtcctcaaaccgctgatgctgggccgcggcgtagacgcgccgatgccgatcgttctgctcggcgcgttgggcggcatggccacagatggcattctcgggatgtttattggcgcgacattgctctccatcgggtatctgatcttcatgaactgggtaaacgaaggcgcggcgaagtaaccgccttaccgccagcagctttccgccgggccgtacaggcggcgaaaaaaaacggctcccttatgggagccgttgcggtttctgatgctcactacttttattcagcggtagcgcgtaccggcggcgcagaatggtaatgcgcgtccgcttcggcaaaacgctgctgcatggccgccgatggcgctttgcccagcaggctgaagaccacaatcccgatactgccgaacaggaagcccgggatgatttcatacagtcccagccagccgaactgtttccagacgataaccgtgaccgcgccaatgatcatcccggccagcgcgccattacgggtcatgcgcgaccacatcacggagaacagcactaccgggccaaaggcggcgccaaagcctgcccatgcgtagctgaccagacccagtacgcggttttccgggttagcggccagcgcaatcgcaatcagcgctaccaccagcaccatgaagcggccgatccagaccaactctttctgaccggcgtttttacgcaggaaggctttatacagatcttcggtaatcgcgctggagcagaccagcagctggcagctcagggtcgacatgaccgccgccagaatagccgacagcaggatcccggcaatccatgggttaaacaggatttgcgccagctcgataaacacccgttcggcgttctggttaaccgcgcccgccaggctcgggttgttattaaagtaggcgataccgaagaaaccgaccgataccgcgcccgccagacagaggatcatccaggtcatactaatacgacgcgcatgaacaatgctgtggtgcgaatccgccgccataaagcgcgccagaatatgcggctgaccgaaataacccagaccccaacccatcagcgaaataatcgccacgaagttcagtcccttgagcatgtcgatattttcgatgcttttttgcttaatcacttccagcgaatcgccgaaaccgccgaccgagataatcaccatcaccggcgttaaaattagcgcgaagatcatcaggctggcctgcacggtatcggtccagctcaccgccaggaaaccgcccacgaaggtataaacgatcgtcgcggcggcgccggcccacagcgcggtttcatagctcataccgaaggtgctttcgaacagacgcgcgccggcaacaatcccggaagcacaataaatagtgaagaacagcaggataaccagcgcggagataatacgcagcacgcggcttttatcttcgaaacgaccggtaaaatagtccggcagcgtcagggcgttgttgttgacttcggtatgcacgcgcagacgcccggccaccagtttccagttaatccaagcccccagcgtcaggccgatggcgatccagctttcggaaataccggagagaaaaatcgcccccggaagccccatcagcagccagccgctcatatctgatgcaccggcagaaagcgcggtaacaaacggcccgaggctacgcccgccgagaatataatcatcaaagttcttggttgagcgccaggcaataaaacctatcagtaccatgccaaaaatataaacaataaacgtcaccaacatgggtgtgctaatagccatgcaaatctccagaatttatttcgacaacgtccaactttgtcgttttagccactaccggaacggggtaatggcgtattggttgtattgggcgagcgtatcctgacggatgcgtcggtatttcacaaacgatttaacacagcatttacacgaaacttgtctcaggaaaaatagcaattttctataggttgcactccctcacgtttttacgggttgcacctgaaaaaactgttaagcaacgcagataaatacgttatgtgaatgaggctatttattggaaattcttatcaagactattaacaattcattcatttctcagcttgctagccaggtcacaattaacaaggttgcacaaagttgcaacataggtgatatttctacgcaaccgataaaagggcattacatagctaacaggagttcccgcaatgggcaccaccaccatgggtgtaaaacttgacgacgccacgcgcgaacgtattaagtccgccgcgagccgtattgaccgcacgccgcactggctgattaaacaagccattttcaactatctggaaaagctggaaaacgacgagacgctgccggaactgccggcgctcctttccggcgccgctaatgaaagtgatgaagcaggcgccccaacggatgagccttaccagccgttccttgaattcgccgaacaaattctgccgcagtcggtcagccgcgcggcgatcactgcggcctggcgacgcccggaaaccgatgcggtccccatgttgctggagcaggcccgtctgccgcagccgttaggcgaacaggcgcacaagctggcctaccagctggcggaaaagctgcgcaaccagaaaaccgccagcggccgcgccggcatggtgcaaagcctactgcaggagttctcgctttcctcgcaggaaggcgtggcgctgatgtgcctggccgaagcgctgctgcgtattccggataaagccactcgtgatgcgctaatccgcgacaaaatcagcaacggcaactggcaatcgcatatcggccgcagcccatcgctgttcgttaacgccgccacctgggggctgttgtttaccgggaaactggtgtcgacgcataatgagaccagcctctcccgctcgctgaaccgcattattggcaagagcggcgaaccgctgatccgtaaaggcgttgatatggcgatgcgcctgatgggcgagcagttcgtcaccggggaaaccatcgccgaggcgctggctaacgcccgcaagctggaagagaaagggttccgttactcctacgatatgctcggcgaagccgcgctgaccgccgccgatgcgcaggcctatatggtctcttatcagcaggcgatccacgccatcggcaaagcctctaatggacgcggcatttatgaagggccggggatctcgattaaactttccgcgctgcacccgcgctacagccgcgcgcagtatgaccgggtcatggaagagctctatccgcggctgaaatcgctgacgctgctggcgcgccagtacgacatcggtattaacatcgacgccgaagaggccgaccgcctggagatctccctcgatctgctggaaaaactgtgcttcgaaccggagctggccggctggaacggaatcggctttgttattcaggcctaccagaagcgctgcccgtttgtgattgattcgctgatcgacatggcgacccgcagccgccgtcgtctgatgatacgcctggtgaaaggcgcctattgggatagcgaaattaaacgcgcgcagatggaaggcctcgaaggctatccggtttatacccgtaaggtctacaccgacgtttcgtatctcgcctgcgccaaaaagctgctggcggtaccgaacctgatttatccgcagtttgccacccacaacgcccatacgctggccgctatctaccagctggcggggcaaaactactatcctggccagtacgaattccagtgcctgcacggcatgggtgaaccgctgtatgagcaggtcgtgggcaaagtcgccgacggcaaactaaaccgtccgtgtcgtatctacgcgccggtcggtacccatgaaacgctgctggcgtatctggtacgtcgtttgttggaaaacggcgccaatacctctttcgttaaccgtatcgcggataataccctgccgctggacgaactggtggccgatccggtcagcgcggtagaaaaactggcgcagcaggaaggccaggccggcctaccgcatccgaaaattccgctgccgcgcgatctctacggtaacggccgcagcaactccgccggtctggatctggctaacgaacatcgtctggcctccctctcctcttcgctgcttaacagtgcgctgcacaaatggcaggcgctaccgatgctggagcagccggtggccgaaggcgatatgcagccggtcatcaacccggcggaaccgaaagatatcgtcggctacgtccgcgaagccagcgatgccgaagtgcagcaggcgctgaccagcgctatcaataacgcgccaatctggttcgccaccccgccgcaggaacgcgccgccattcttgagcgcgccgccgtgttgatggaaagccagatgccgacgctgatggggatcctggtacgcgaagctggcaaaaccttcagcaacgccattgctgaagtgcgcgaagcggtcgacttcctgcactattatgccggtcaggtgcgcgatgatttcgataatgaaacccaccgcccattgggcccggtcgtctgtatcagcccgtggaacttcccgctggcgatcttcaccggtcagattgccgcggcgctggcggcaggcaacagcgtgctggccaaaccggccgagcagacgccgcttatcgccgcgcaaggcgtggcgattctgctggaagccggcgtgccgccgggggtgattcaactgctgccgggccgcggggaaaccgtcggcgccgcgctaacctcagatgaacgcgttcgcggcgtaatgtttaccggttcgaccgaagtagcgacgctgctgcaacgcaacatcgctaaccgccttgatgcgcagggccgtccgacgccgcttatcgcggaaaccggcggcatgaacgcgatgatcgtcgactcgtcggcgctcaccgagcaggtggtgatcgacgtactggcctcggctttcgacagcgccggccagcgctgttccgccctgcgcgtgctttgcctgcaggaagaagtcgccgaccatacgttaaccatgctgcgcggcgcgatgagcgaatgccggatggggaatccgggccgtctgaccaccgatatcggcccggtaatcgacgcggaagccaaagagaatatcgagcgccatattcaggcgctgcgcgcgaaaggccgcaatgtcttccaggcggtacgagaaaacagcgaagatgcccgcgaatggaatcacggtacgttcgtggcgccaacgcttatcgaactcgagagcttcgacgaactgaaaaaagaggtcttcggcccggttctgcacgtagtgcgctataaccgtaacgaactggataagctggtcgagcagattaacgcctccggctacggcttaaccctcggcgtgcatacccgcatcgacgaaaccatcgctcaggtcaccggcagcgcgaaagtcggcaacctgtacgtcaaccgcaatatggttggcgcggtggtcggcgtacagccgttcggcggcgaagggttatcgggtaccggtccgaaagccggcggcccgctgtacctgtatcgtctgctctccagtcgcccacaggacgcggtcggcgtcactttcgcccgccaggatgcggagcgtccgctggacgcccagttgaaaacgctgctggaaaaaccgctgcaggcgctgcagcagtgggcggctggccgtcctgaactgcaggcgctgtgtcagcaatacagcgatctggcgcaaagcggcacccaacgactgctgccagggccaaccggcgagcgcaataccctgacgctgatgccgcgcgagcgagtattgtgcgtggcggataacgagcacgacgcgctgattcaactggcggcggcgatggcggttggctgtgaagtgctgtggccggatagcgccttgcagcgtgaactggcgaagaaactgccgcgtgaagtcagcgagcgcattcattttgctaaagcggatcagttgaccagccaggctttcgacgcggtcatttatcatggtgattccgatcagttgcgcgagctgtgtgagcaggtggcggcgcgcgacggggcgattgtatcggtgcagggctttgcccgcggtgaaaccaatctgctgctggagcgcctgtatatcgagcgttcgctgagcgtcaacaccgccgcggcaggcggtaacgccagcctgatgaccatcggctaaaacgggctccccggtggcgctacgcttaccggggctacataaccccgccaaagggtagcccggccgccatccgggaaatctacggcgcgttcaactaatgacagccgaccacagctgtgctaattaaggctcccggacgggagctttttttatgggagtagaacgatgaaacgcactttaattgccgccgctgccctattggccagcggcgcggcgtgggcggatgactgcagcaacgccaacacgcaaaccgaaatgaatcagtgcgccgccgcgcaatatcaggcggccgataaaaagctgaatgagacctggcaacaggcactgaaacgcgcctccggccaacagcaggaattgctgaaaaaagcccagcaggcgtggatttccctgcgtgatgccgactgcgcgtttctcgcttccggcgcggaaggcggcagtatgcaaccgatgctgataagccagtgcatgaccgataagagcgtcgagcgcgaagccttcctcgcctcgctgcttcagtgcgaagatggcgaccaaaactgcccgctaccgccagctaattaacgtacgcggatcccttcgataatcatccgctgcacgttatccacggtttgctggaaaaataactcatcctgcagcgttgcgccggtcaccgcctccacctgagtggcgaaatcggcgtaatgctgtgttgtcgcccagatcataaagataaggtgctgcggatcgaccgccgccagcttgccgctatcaatccatgacgagattatcgccgacttttcatctatcaacgccttcagatcgccggtcagttcgcccatcagcagcggcgccccctgcagcatctccagacagaacagcctggaagcctgaggatgatcgcgcgatacctccagcttgaggcgaatatattcgcggatcgccaccagcggactgatatcttcgcgaaatgcccgcagcggcgccagccagatggcgaggatccgctgtagcacggcaacgtacagcgcctcttttgacgggtagtaatagagtaaattggttttcgatacgccggccagttcagcgacctgctccagccgcgtaccgtgaatgccgaactgcgagaaggtctccagcgcagcggccagaatggcctcttttttggcgctcaccgcctgtgaacgcttgccggtttttttcacggcgccctgtgccatacgtcttctccttcagtagtcgtcttcagcatagcaaaagcccctcgccgacacgaccctgcgcactccgatcgcgcatgactgccgttttttcgtgcactgattttgaccattcagtccacatttttatcctcaaatccagaaaccattacgcaacacattaataacaaaaccttttttaaaactggcattgcctttgctttatttccactgcgaggtggttcggggagaggcaggatgccgcaccgcgcaatttcatcttccatgacgacagagaggtagttatgaaaatcggtgttttcgttcccattggtaataacggctggttaatttccacgcatgcaccgcagtatatgccctccttcgaactgaataaggcgattgttcagaaggccgagcactaccatttcgacttcgccctctccatgatcaaactacgcggcttcggagggaagaccgagttctgggatcataacctggaatcgttcaccctgatggccggtctggcggcggtgacttcgaagatcgagatttatgccaccgccgcgacgctgacgctccctccggccatcgtcgcccgcatggcctcgacaatcgactctatctccggcggacgttttggcgtgaatctggtgaccggctggcaaaaaccggaatatgaccagatggggatctggcccggcgatgaatacttcgccagtcgctatgactacctgactgaatacgttacggttctgcgcgatctgtgggggaccgggcgcagcgattttaaaggtgattacttcaccatgaacgactgccgggtcagcccacggccatcacagccgatgaaggttatctgcgccgggcaaagcgacgccggcatggcgttttccgcccaacacgccgactacaacttttgctttggtaaaggggttaatacccccgccgccttcgcgcctaccgccgcacgtatgatgcaggcggcggaaaaaaccggccgcgacgtcggctcctacgtgctgtttatggtgatcgccgacgagactgacgaagcggcccgcgctaaatgggaacactacaaggccggcgcggatgaagaggcgctggcatggctgaccgaacagagccagaaagatacccgctccggcagcgataccaacgtccgccagatggccgaccccacctccgcggtcaacatcaacatgggcaccctcgtcggctcttatgccaacgtcgcccgtatgctcgatgaggtggcggcggtccccggtaccgacggcgtactgctgaccttcgatgatttcctgcagggcattgatgcctttggcgaacgtattcagccgctgatgcgctgccgtgaccatattgctcccattacccgcgaggtggcctgatgattacccttcccgctcgcccggaatcgctgaccttcgcgccccagcacagcgcgctgatcgtggtcgatatgcaaaacgcctatgcaagccagggcggatacctggatctcgccggttttgacgtctccgccacccggccggttatcgataatattaatctcgcggtggccgccgcccgcgccgccggcatgttaatcatctggttccagaatggctgggacgaacagtatgtggaagccggcggccccggctcgccgaattaccataaatctaacgcgctgaagaccatgcgccaacgcccggaactacagggcaagctgctggcaaaaggcggttgggattatcaactggttgacgaattgcggccccaggagggcgatatcatcctgccgaaaccccgctacagcggctttttcaataccccgctcgacagcattctacgcagccgcggtattcgccacctggtgttcaccggcatcgccaccaacgtctgcgtcgaatcgacgctgcgcgacggctttttcctcgaatacttcggcgtggtgctggaggatgccacccatcaggcgggtcccgccttcgcgcaacaggcggcgttgttcaacattgaaacctttttcggctgggtcagcgacgtcggcagcttctgtcgcgccatagaacccgccgccccgctcgcttttaccgaggagaaacgctatgcctaaacaggtgattattccccccggcaccgctacgccgattgccccctttgttccagggacgctcgccgacggagtggtatatgtctccggcactctgccgttcgataagcaaaacaatgtgctctaccccggcgacccaaaggcgcaaacccgtcacgtgctggagattatcaaaagcgttatcgaaacggcgggggcagtatggcggatgtgaccttcaacaatatctttatcaccgactggcaaaattacgccgcgattaacgaggtttacgccgagttcttccccggtgataaaccggcgcgtttctgtattcagtgcgggctggtgaaacccgatgcactggtggaaattgccagcgtcgcccatatcggtactccaacatgatgaggctcaatattgccccgccgccgtggcccggcgcgccggtggtggtgctgagcgccggactcggcggcgctggtgcgtactggctggcgcagcgggcggcgctggaacagcattatcaactggtgttctatgaccataacggtaccggggagaaccacggcccgttgccggaaaattacagcatggcgacgatggcgcaggagctgttccgcgccctgcaggcggcggggatcacgcgcttcgcgctggtgggccacgcgctggggcgctgattggcctgcagttggcgctcgatcgccccgaggcggtgagcgcactggtgctggtcaacggctggctgacgctgtcgccgcatacccgccgctgctttcaggtccgcgaacgcctgctgcatgccggcggcgcccaggcgtgggttgaggctcagccgctgtttctttatccggcggagtggatggcggcccgcctgccgcgtctcgaagcggaagacgcgttggccatcagccatttccagggcaaggagaatctactgaaacggctgcaggccctgaaacaggcggatttttcgcgccgcgtagcggctatcgcctgcccgacgctcatcatcagcgccaccgacgacctgctggtccccgcctcctgctcgcgaatgctgcaggcggcgattcccggtagccgactcgtggaaatggcctggggcggccatgcctgtaacgttaccgacagcgacacttttaaccctattttacgcgacggcctgacgaccctgctgccggtcgccgaggagaatatatgagcgaagcaatcaaccaaaaggcttgcgagaccctattcacccatgcccggacctacaatggctggcgggaacaggcggttaacgatcggcagctgcaggagatttacgacttgatgaaaatggggccgacctcggccaactgttcaccggcgcgaatcgtttttgtgcgcagcgccgagggcaaagcgaaactccgcccaacgctctccagtggcaatgtggaaaaaaccatgcaggcgccggtcaccgccatcgtggcctgggataacgcgttttacgaccgcctgcccgcgctgtttccccacggcgacgcccggagctggtttacttccagcccgcagctggccgaggaaaccgcctttcgcaacagctcgctgcaggcggcgtatctgattttcgcctgccgctcgctgggcctcgacaccggcccgatgtcggggttcgaccgcgagaaagtcgatgcggcgtttttcgccaacagcggctggaaaagcaatctactggtgaatatcggctatggcgaccccggcaaattgtacgaccggctgccgcgcctgagttttgatgaagcctgcctgctggcataaggagacggtaatgaacgtagcggatcaacacagttttcgtgacgccatggcccatgtcggcgcggcggtcaacattatcaccaccgaagggcctgccgggcgcgccggttttaccgccagcgcggtatgcagcgtaaccgataccccgccgacgctgctggtgtgcctcaaccgttcggcttcggtctggccggtattcagcgaacatcaggccctttgcgtcaataccctcgcggccggacaggaggcactatcgacgctgtttggcggtaaaacggcaatggatgagcgctttgccgccgccgactggcaaaccggtgcgaccggctgcccgcggctgaaagaggcgctggtcagtttcgactgccgcatcgaccagcggctgcaggtcggcacccatgacattctgttttgccaggtcgtggctatcgcccgccagccggaaccgcgcggtctgatgtggtttgaccgcggctaccacacgcttatgcggcccgtttgttaacctctcacccgggatatcatcatggcactcttcgattttcctcgctggcagttaaccacccccgccgcggatgccggcgttgtcgccccggatgaacgtttatccgccgggcaaacgctgatcatgggcgtacagcatgccgtggcaatgtttggcgcaaccgtattaatgcctttattgatggggcttgaccccaacctggctatcctgatgtcgggggtgggcactctactgttctttgtcgtcaccggcggccgggtaccgagctatcttggctccagcgccgccttcgtcggcgtggtcatcaccgttaccggctttacgggccaggggttgaatcctcatctcaacgtcgccctcggcggcatcatcgcctgcggggtgctctataccctgattgggctggtggtgatgaaaatcggcaccggctggatagagcgtctgatgccgcccgcggtaaccggcgcggtggtgatggcgatcggtcttaacctggcgccgattgccgtgcacagcgtttccgccaacgccttcgacagctggatggcgatgctgacggtgctttgtatcggcgccgtcgcggtatttacccgaggactgctgcagcgtctgctgatcctggtggggctcattatcgcctgtgcgctctatgcgctgctggccaacgtattcggtcttggcaaaccgctggattttgcccctgtctctcaggcagcatggtttggggtcccgcactttacttcccccacctttgacagccaggcgatgctgctaatagcgccggtagccatcattctggtggcggaaaacctggggcatttgaaggccgtcgcgggaatgaccgggcgcaatctggatccctggatggggcgtgcgtttgtcggcgatgggctggcgaccctgctttccggcacctgcggcggtagcggcgtcaccacctatgcggagaacatcggcgttatggcggtgaccaaagtctattcaacgctggtatttgtcgcggcggcgctgatcgccatcctgctcggcttttctcccaagttcggcgccctgattcatacgattccaggcccggtcattggcggcgcgtcaatcgtggtttttggtttgattgcggtcaccggggcgcggatatgggtgcagaatcgggtcgatctcagcctgaatgcgaatttaatcatggtagcggtgacgctggttctgggcgcaggcgattttactttatcgctgggggctttcgccttggagggattgggaccgcgactttcggcgctattctactgcatgcgttgcttaaccgccgtcagcatcaggaaaaggtggcaaaagccaccacgatataacgagggctcgccccggcggtgcgcgccggggccatagttagggctcgcgccgctcagcaagttctggcgcttcctctgccgcaatctgcggccgcgattttttcttccacttcagctcgctgaccagcaccccggcgagaataaacagacagcctaccagcgccagcagcggcagacgctcgccggcgatacgaccaaacacgccagcccaaaccggctcgccggtgtaaatcagcgtcgcccgcgtcggcgatacgctacgctgcgcccagttcatggtgacctgaataatggcgctgaaaattccgagtcccagcgcgacggccagcagttccgggcgcatcggcgggatagactcccctgccggtgccatcgcggcaaaagccaccagcgaggcggtcgccagctgtaccaccgtcacccggcgcacatcgacctgacgcgcccacgcgctgattaaaatgatttcggcagcgatagccaccgcgcttgccagggtaatcatttcgccaatccccaaagccagcaggttgttttccggccccgccagcaggatcagcccgataaaagccagcacgatgcccacgcaggacatgaccccaggcatgcgccccagacacagccactgcaacagcggtaccagcggtacatacatggcggtaataaacgccgatttactgctggagatggactgtaagccccaggtttgcaggctgtacccgagcgcaatcgccacgccaatcgccacaccggccttaacctcaagccaggtcaggccgcgtagcgtacgcagcgacagtagcgccaccgccagcgcggcggtggcaaagcgcaggccgacgaagaaaaacggcccgctaaagctcacggcgtattgtacggcaagaaaggtaccgccccagaacatggtgatcacaatcaggatcagttcctgcggcgttatcgagagtttgagcgaagacatgaggcgaccaatagcgataaatagctaaccagtttcgcaggcgcttcaggccgaaagcaacacccattgacaaaaaaaccgccgacatacgtcggcggcgagggtgatgcggcagggtcgggggagattaacaccgcatcataaaagacagtcccggctagctatcgcgattgccgtgactatttttacccccttttttgccagcttccgaggcgcgttgaggatcgtttttaaagttccccccgctgtgctggccacctttacgacctgcttctgatgctctggcacgatcttcggcaaagttaccggaaccgccacgatggtttgccattactgacctccattggttttgacatcatattgcattaggtgagttcagggcctaagcccccgcggcatatggcattgccattatgcatcgcgtgcttataagagtagtaaatgaaactcattccccgagcaaatagtcacattccgcaacatttaatcgtcaaaaccagacgccagccgcgattgcaaccgctaagcatttcttcttacagctgaaatcagccctgcgcaaaatgtatctatttgctacgaagcacgttgcaaattaatctttgccattttgttataaatcaaacaaatgtttgttggatttgcactctgcgccacaggtcttatctttatagatagccagtcgtttggctggacaattacgcaaccgaggagtgatgcaaatggctaaaattctggtgctttattattccatgtatggacacatcgaaaccatggctcatgccgttgccgaaggggcaaataaagttgacggcgttgaggtggttgtgaagcgcgtgccggaaactatgcaggctgaagagtttgccaaagcaggcgggaaaacacaaaatgcgcccgtcgccacaccgcaggaactggcggagtatgatgccatcatctttggtacccctacccgtttcggcaatatgtcgggacagatgcgcaccttcctggatcagaccggcggcctgtgggcttccggcgcgctgtatggcaaagtcgccagcgtctttagttcaaccggtaccggcggcggccaggagcagacaattacctcaacctggactacccttgcccatcatgggatgatcattgtgccgattggctacggcgcgcaggagctgtttgatgtctcccaggtgcgcggcggcacgccatatggcgcaaccaccatcgcaggcggcgacggctcccgtcaaccaagccaggaagagctggctatcgctcgctaccagggtgagcacgtcgccaatgtagctgtaaaattacacggctaaccttcaacaggaggagttgcatgccgaatcaagaagcgaaggcccaccacgtgggcgaatgggcaagcttacgtaatacctctttggaaatcgccgaagccattttcgaactcgcgaattacgatgaaaagctggcggagaaaatttgggaagaaggcagcgatgaggtgctgtcgcgagctttcgccaaaaccgataaagacagcctcttctggggcgaacagaccatcgaacgtaaaaacgtctgatagcgcaattgcgcgggcattgcgcccgcgctaattcataacccggactgctccggtttttttgttttattttgccgcctcgttcatgacctttttgaacgtctccaacgggcagaatccctggtcatcaaccggacaaccgttaagcgccagcgtgacccgctgcggcggagattgcagactcaacgcatcggcattgcgcagctgttcagtgctttgatagacatactcaatcttcattaaatcgcgattgctgccgctatcgtgccagcgctggaacagcagcttgccgccgatgggggtgcgctcatactggccgggtaactgatagggtttaaagtccagcgccgtcagcagcgaagcgatattggaatcatgcccgactagcagcgtcactttcgccttagcggcgccatcgcccaccagcgcattatcgatatatttgaccagcggcttagcgacgttgcgcgccacttccgcggaagtaaacaggctgtcctgatagccgtttttcagttttgacagcacctgccactgcttatcgctggcaatttcgccccacgccacctgatccttaggaaaaccttcgtagtactgcagggtgaaggcatccaccagcgagttaccgaccttcagcggtccggaaacacctggctcctgctgatatttggcgctaaaggtatctttaccgtcgctaagcgagcaaacatgcttttctttacaggatggcgaattacgatagtcggtcatctcttccagcagcttgtagctctcagcgagctgcatcccctgacgctctttttccattgcctgcaccgctttttgcgcgaattcggctgaatcgtcagtaatgaccgggttgaacgttggatccatcgttcccatctgcggctgatgatgcacaggcaccccgcagccagggaaagcgccggtaataaagaactgcgcggtggcgacggtccgctgcaggctattagcgtaggcgtagacggcattttccggcgggcattcgccgctggtcaccagcttctgctgcgccagccactcacgcatatagtggcccatatagacctccagcacgccgcctttggtggttaactggcccccaggcacatcccacttcggccaggatttcggcgtcgactgctcaagtacgctgccgttattggccagcggcgcgcgcaggttatggcggctcatgatcagcacctgttgcagctgatacccttccggcgcaacggcgtcctgcgcctgggcgccggcggacaacaatacggccccggccaccgcggcggcgagtagactttttttcatcccttcatcctcagtcatttattatcatcgccatcattgtgacggatttatgacatttttgcgggcaatggctcacaaactgaggcgtcggtcgctttttgtcgtagagggcgtggcgaaagcggctcctattccggtaatggcaccgccgccagcgtacaaatcgcttcatgttcgccgccccggcggtcgaccatcaccactttatccccggcctttttaccttcgcagggttttaacacctgctcgacaattcgttcgcgaacctgttggctttccgactgcgcccaactggcaaaagccgtcagcataagcgccgaagcaagcaggccggcgagacttgttttaaacatgcattactctcagaaaattctcattcaacgtttagcgtaacagccgccaacccgttcgtctgtaacttgacttaacggagtgttacatcacacgctcagacgctcacagagcgtcgtaaacacataaatactatcaatactttaacataacgagccatgctggatgcctttggcacttttaggtcatctttcggaaacatcccgatgttatcgtcttcgtgaggcgttattttttcttctgtttaaacaaatcattaggttaatttatgtcgggtttcttgctctttatcgtggcgatcgctctactgggtgtcgccgtttatagtctggtgtcttacatcaaagaacgccgtgccggtcagttgccaaccgataaaaaaaagaaataattccactttgccaatctttacacctgggctgcgtattaccatggacaggagccgatctcacggtcggcttcttcccgtccatacaataagattcagctcaataccccatatgttgatatgccttattgacggctaaaacagtcaatgacaaaccagtgccaacagcgataattgcaggaatgactatactcgccacgatccacagcgtagagatatgttcaggtttaggcgtaaaactcacattataaaacagccacgaaatcatcaggcctcccgatactataacgctgtgcacaacaggtggtatcgtatggcccacttagctttgtcgggtaaattcgtcttctttgaagacaaggaagtaatagaaaacttgttattttcagatgtcgccaccagctgctcgccttgcgcatacctaacggcatcggcagccagcgccaaagccagccatcgataaccggcactcttttcccctagtgaggcctccatatccaggcgttctgacgccagattttttgcatctaacgcctgcaataatgggtatttatccactctggacaatcctgtataccacagtgttttaggtgcaataacggacttaacctccagatagaccggcatcttttcttctacatcagcaacgccggacatcggctgataaagatataccggcttttcgcctgctcctctgacagagtgattagtgaacaaaaacgcacaggcgctttccatgcttttagaatcgctatcttcttcatgtatatcgacagtaatgacgattcggttaatgacgttgtcatcgggcgcagcgatccatttatccaccatgccgtactccggacactcggtaaggtattcgatttcacaggcgttggcgttagggatattcagatgctccagcactctcctcaatgcatctacacagaagttatctcccccacgtacccagacgataatttcaattccgcggtaattattaccgttcaacatcatagccattggggtaagcaatttcgtgaaaatttgctcattacgggtctgctcgaaaagatcttcaatttctatcctgagtggggttttcggagctaacggaaactctccctccagtttcagcatattgagcgcaggctgttctaaaggggttagagcattccaggcggctagcgcgatattttttcgggcataggttttaagctccacctcccatgatttggcaatatatttgcgtatttctgcgtaacacactgtcgcactcaataccatcttcacgaagaacaatatcgtggtcaaaacacaggcaggaagtaatacggaaggaatgaagaactcaaacgtgacaggtttattttcaggccagactagcgcctgtataaacaggcataccgtgataagcgctacataaattatcacgacagccaatacaggcatctcatcctgaatatcttcctgctctgaatatagccaccattccattacaccgctcccgcagtttgtagcgtcgttcgtatcgcgcatccacattcagctttacagccatccactaccacaccgcgaccgttcatcgtccaaaaggggtgacactcagtaataccgaaagtccctttgtgcgtagtacactgaactttgtcaccttttagggtgacaggggttcccataaattcagcaccggatgatgtgatcacttttcctccgcccaccagcggatcatttaacctaatgacacctttcattatttttgctcccttaacgtcctgcatccatatcacaacgcatacgatcccagccggtgtagccttttacttcgggcacgttgtcgggaagcccctggtagttggtgtggaattttgccgtatcgttctcaagtccttgtttggtcatataaaccatccccatgaccaacctggaaactgggggttatagtgtgagtttccccttcaatgacatattggatacccgggccaccagccgccagacgtggatcgtcgaacggtttggatgacatatacaggcgatgcttcgtctgcaaaaaaccctggtcgttgacgacggtgaaagagagaacatcatctcgagggggagaattcatcccatccggctcgttataacccggcgaatatccgacagggctccaggtttgaccgttatctttcgagacaataaacccatctatttcccagttaggaatagcaatatagcgctcagacggatgaataaattttttagtatatattctgtaaaattggctaactggttcggtgtgaatccccctcagtgtatccgtgtaccagagttcgccctcacaatcccaacccttcagctccagataacggtggtcatcaaaccgataaatgacctgcgtcggcggctgttgcgcctgacatccaacgaccataagcatggccgccagagcggtgaataatcctttcatggctatctccctgcatccatatcacaacgcatacgatcccagccggtgtagcctttcacttcgggtactctgtcggggagtccctggtaattggtgtggtattttgccgtatcgttctcaagtccttgtttggtcatataaaccatcccccatgaccaacctggaaactggggggttatagtgtgagtttccccttcaataacatattggatacccgggccaccagccgccagacgtggatcgtcgaacggtttggacgacatatacaggcggtgcctggtctgcaaaaaaccctggtcgttgacgacggtgaaagagataaggtcatcatatggggggacgaatcaccgtttggctcattttctctgggagcaaatgaggatggataccacgtttttccgtagtcctttgacactataaaccccgcggaatcccaagttggcagcgcaatgtaacgctcagacggatgaataaattttttagtatatattctgtaaaattggctaactggttcggtgtgaatcccctcagtgtatccgtgtaccagagttcgccctcacaatcccaacccttcagctccagataacggtggtcatcaaaccgataaatgacctgcgtcggcggctgttgcgcctgacatccaacgaccataagcatggccgccagagcggtgaataatcctttcatggctatctccctgcatccatatcacaacgcatacgatcccagccggtgtagcctttcacttcgggtactctgtcgggtaaaccttgccagttcgtcttaaattgctgcgtgctatgttccaacccctgcttagtcatatagaccattccccaagcccacccaggagaacggggttccaacttattgcttaccttttggcccataccatcatctacggtgtactcaattcctggcccaccaggcaaaattcgcggatcttcaaacggcttcgatgacatatacaacctgtgtttagtctgcagaaacccttgatcgttaacgacggtgaaagagagcacgtcctctgcaggcgcgtaatcatcaccattcggttcattagggccaggggaaaaacgtgcggttgcccaggttttcccatagtctttcgatacaagaaatccatccacttcccaattggtaatcgctatatatttctcagaaggatgaatgaatgtccgcgtgaaaattcgataaaactggctagctggctgagtatgaatacctcgttgagtatccgtataccaaagttcaccttcgcagtcccagcctttcagctcaagataacgatgatcatcaaaccgataaataatctgcgtcggcggctcctgagcctggcaaacggatgccagcagcgtagtgatcaccgccagagcagtacataatcctttcataatatatcctcaggccagctggccgtcgcttttaggttttggcatttcccactgcaaaaactttctttcctgaaagtcttttgttctgacaatacccatatcaatatccttcggcctgcgggtttgaggtcgcttaccggcataatcattcaccacgccgtaatccccttgcggcagcactttgtcgggtttgttcatatgaaatttggttggtatctctggtaactttcccgtccggtaatattctttagccgcagagaattcattcaacggatcgcgccagtccgcgctgtgcagcagactttcccagaatttacctgctttgtagtcaaacgatttgcactggccgattgccaaatcgaacgccatcgcatgtgacggcgcaaactcactcataacaatggaagagtgctggctgtagcttatcggatcagttttctgccactctttttccagctcttcacgcgttttcaaccaggttatagacagcaccgggtactcttttgaaccacgaacctccccatgaatgaccgtatgcttcctgtcaacacttgccatcttaagttcgtcggaagttaatacgtgccccggtttccatctaagacgctgataattgtcgagcatatacattgcagaatcggtgcgtttaatcgtactggctttggctgaataggatatataagcatcaggactatcaggatcgatataatacgtatacggcttgtcactggtttttggatcattatccggatggttatcctccccctggagtttaaaaataaaagattccggtaattcctcgccgttaaccacgacatcgcgagccttgtagcgggtatttgttaaaaaggcataatttgcatccccttcctttcgcggcggtaattcaaatggcttagcgttcggggcgcttcccactacaccatgctgataaaacacgcgttgatacaggttaggaatctcattggctagtttctgcggaataccgcgccagccgatcccctgaacattttccagcgacacaacgccatcattggggcaaaagtagttatacaccttgccgtcgttgcttcggcaataccggtcatcggatctcagtgggttatcagagggtttacgcagggcacaggaggcctccagggccagtaattcgctctcggttaattttccaccccctttccattgcgtatacatcaggttgcagaaatttttgaatgtcttttgcctggccgcatcagtctgttgatatcctggctgaatattttcagcgttgcgggattcctgtgaataggggaatgattaagaattacgcagttaacgggatcgtagccagcctgtttaaccaacatgtttgccagcatggtgatgatagttccctggctatgagcgaccacgttaatcacatccttcgctgtaacaggctcaccccggatctgaataatcaaatcggccagtcgctgagccgcaaaaaactgatagatacggtgcgggttttcataaatgggatgagtgaaatcgccaccatttaagtgtaatgaggcaaagcctgcagcggccatgcctaaacctcctgcccccggccctaacatatccgggatcgtggtggtcgcattagcgaacgtcccgcctcctttggcaaaattcgcatccagcgcattaccaaagttatcgttctggtacttaaatacaccttttccgtcattccccaggctggcttttttagcctcattatcttcctggtaagcgtcaaacggcaggtgcgcgctgtcttgtagcttgctgacctcattccggtaacgctgttgatcgcccatgtactcttcacgcgtgacaggcttatacccccaatagaacgggatgatgggggaacggccgggaacggtgattctgcagtctttccattcgtgggcgtaaaaatccggccgattaagccgtttcttcagtccggcaataatccccttctcctgattctggtacgcctcgccgacgtcgttcacgccatggaccaaaatcactatccccggcatcggtcggggaatgccaaccctgcaggtctgcgcctccagccccagtgatttatgcactcctacatcattctcagacacaatacgcgggcaatacggcttctttttctcgacagtcattacagtacctccagtttgtacgaatcaagatcggccgaatcgagcaatggagagcaaccattgctgtccgtctctccctcgagcacttcgccgattgagctcttgagcctgaaaggacgattcgccagaacctgttccggatcgtcagaagcatgcagttgatagcgacgcttaaaggttcctttatcaaaggcaggtgcttgcacctgcgcgctttctggccccagatacctgagattcggccctttaatatcgaccccgacaggagagaaaatctcaacctggccatcaggactgattcggatcccgccgcctccgcacaccagctgtatgccctgtttggcgctgccatgcagtctcccgtccgtactggttagcgtaaaatcctgctgagagagcatatgtatggcgccgcgctgcgcctgcgtggtgatatccccggcgccggcgaccatctgaatacctagcttgcgggcaaacaatgagagtttttcgcccacggccagcgagaatttcttcatcacgttcatactggcgtgacgacctgccgtcgtaatcacatcctgtccagccgacagttgcagactttccggggtcacatgcgcctgtccttgcccgccataggtcagcagagctgcgccgctgagtttattcagcgtctggccgagcgtattttgccgatcggtatccacattactggcgccggccgtcagtgcgctttgttgcaatgtcattgccagcgagagcgctttttccagttgcgtaatcgcggcggtcatatccaactgctgcccctgggcccgcggctgcgcttgggtggtgatcatcaccccctttgccgcacgcaaagccatccagtcatcggtacgggcctccagcccttccccgcgtttttttccttccgcatcgacaaggtggcccagattgagttgccccttgccgtgctccgtcgaaatcttgatatgctccttaccccggcggtcctccagacggatttcgttcagcgctgccgtgcggataatatcgcgggtatcattacggtttgtgaccagatcggggcgagcgccgtcatgcatcacatgcgcaatgaaaggcctgtccgggtcgccaccttcaaaggcaatggcaacttccgtcccatccagcaacggaaaatgaaaaccgtaagtgtcgccggcgtaaggcctgcccagccggactagtgcgttttcaaagccgctgcgtttttcattgagatcaaaatcaaacttcacgcagtaacgccccctggcatccaccccggcatacgttttatcccttccgatagaggccacccgcgcgggcaccgtaccggcaatgacaggtcgcgacagatactctggtcgaaagttgtatcctgacagatacggaatgccggcgagctgcgcgtggtaatgtcgggctcgactacccgtaatcgtcatggtggtaatcaaaaaacccggtttgaagccgtctggtaccggcccagtaaggtgaaacataacgccaggccgcagctccggatcgctggttgttgcactgagccggttctgctcattcagtagacgttcatagcgcaggcgggcgtaaaacgtggccgtctcagcttctgttgcgtgaaaatcgccatctgcgaggtaatgatcggcgtagtgatactctcccccggacataatcccatccggaatatcattattgataatggttttaacagcttgtggagaatacggatcgcgatagttgtaggtgcgtactaatacctgttcaggaaccagcgagtgctgctcttccagatcggtcacatactcgtcatagctggtcatcccggaatagcggacgtaggggagttttttatcgcggtaaatgtatcgactgtcagagtcagcaaaaatcaccacggtttccgtctgaaccttatggtgattctcaaaacgaaaccagatgccaatttcagccaacagtcgacgaataaactgcagatccgtttctttccactgaataatcatttcccttcgaggataggtgtaactcagcctgtcgaaatcgatattataccctttgaagtagccgctatttttcatgagttgcgtaacaacttccggcacggtgacatccgtatacaccgctgagcgataatttttatccagcagcgcaagctcatgctccagcacacactcataaagcgcctcatctgaggacgacttcaggcgggtaaatcgtgttattacgccgttaatctggcgtaccggcaaccaggcagcctcgttctgccaacgcgcgttcggattaggcgcccgaagataaaactgcgcgatctgattgagaacagctccggcggggatattgtcatcggcactggtaaaacggatggtataacgatacggcttactgagcgtctcttcgcctataaaagaatgcacatcggcagccgtacttttgcttcgcggaaagtaaagcaaataacggtttaacgtatcctgtaattgaattattttagtttgttctgtcataaccaaatatccttttgataaaacagcactgaccaaaaataatacgcccagcaacacaaaattaaaatataagtttattatcccataatatataatattaccggcccattatattcacagcggaaataaaaaccgttcatttaaagtcgacaaaaaaacaaaagatggggtaaaagcagatattcaagtcattaaaaagggctccatgataaacatggagcccttattcgacatcaggcttgcctgccttgttgtcatagtaacgtcaaattacgactcccaggcctgctccgctttcgtcgcatcaaactgcggcggcggtttacggaaacggcgggtcaggtaggtcagataaagcaatcccagcgcggcccacaccagccccagcgtcagcgaggtcgcctcgaggttcaaccacagcacccccacggtcagggcgcccaccattggcaacagcagataatggaagcgatctttccaggttttgttataacccttgcgccgccagaagtggttgtataccgagagattaacgaaggtaaaggccaccagcgcgccgaagttgataagcgccgtcgcggtcaccagatcgaagaacagcgccgacagcgcgacgatgcccaccataatcacgttcagcgccggggtacgccatttcggatgcacatagccgaaaatgcgttccgggaagacgttatcccggcccatcacgtacagcaagcgcgacacgctggcgtgtgacgccaggcccgatgccagggtattaacaaaagtggtgcacaggaaaatcgactggaacagcttgccgccgacgtacagcgcaatttccggcagcgcggcgtccggatctttaaatcgatggatatccgggaagaacagctgcataaagaacgaggcgacgataaaaataatgccgccgtacattgcggtaaggaagatggccttcgggatcacccgcgcggcattcggggtttcttcagaaagcgtggtaacggcgtcaaagccgaggaacgagaagcagacaatcgtcgcgccggtaataatcggaatcagatgcgcattctcgctgataaacggctgcagagaccagacggtaccaacgccctcgcctttatgcagcccttgtaccaccagaatcacaaacaccaccatgatggagatctgcaccagcacaaacaaggtattaaagttggccaccaggttaacgcttttcagattcgccgcggtcagaatgacgacaaaggtcacgacccacacccacggcggcacttccggaaacagcgcggagaggtaaatcttcgccagcaggacgttaatcatcggcaggaacagataatcaagcagtgaggaccagccgaccataaaaccgatgtgcgggttaatcgatttttgcgcataggtgtaggccgagcccgcttccgggaactggcgcaccagtttgccgtagctgatggcggtgaacagtaccccagccagcgccagcagatacgaggccggaacgtggccattgctgatgccggaaacgatgccgaaggtatcaaacaccgtcattggggtcagataagccagccccatcatcaccacttgccacagtttgagcgatttacgcagacgcggtttccccgcctgagcggtgttttccattggaagattagcagccatgacgcattccccccatgccgacgacagtttgtgggcacaaagaccgggtaacaaacctgcttagcaaggggtaaggcgtaaataaaagggtaagacggaccgatgaacggcggtaagttggcatccaatgcggccaaagaggcccccttctccctgcggatatttgaacatctgcatcatctcatttcctcgtcacacactgtgtcgttaactgaagccccgttgccgcctgcgctccttaacgcgacatccgggaatggctgggctcccagcaaaaaagaacgaccaggctccgctcaggccgtatgatgctaccgattaaactaatgcgccccttacggggcgaacatcaggcgtttttcaacatccactcaatttccgtttctgtgataagacgctcaaactgcagtaactcatcattcttacaggcgtggtaaacatggcagaaacgctcgccaagacgctcccgcagatgatcgttttgcataaactcccacagggcgtcgctctggcggatcgggaacggcaagccttcttgttccagaccgttaccttccacctcgtcctgcagcggtaacggattatccagcccgtgcaggataccggcgaaaatcgccgccatcaccagatacgggttggcgtccgccccggccacgcggtattcaacgcggtggttatgccgatcgccacacggaatgcgcagcgctaccgtacggttgttatgcccccatgacgcctgcgtaggcacatacatgcccgcctggaagcgacgatacgagttcacgttcggcgccagcagcgccatcgacgccggcatcaggtcaatcatcccggccagcacgcgtttcagcagggctgaatcctcgccgtccgcatccgccagcacgttttcacctttattgttttgcatgctgatatggatatgcatcccgctacccgcatgctcttcataaggtttcgccataaaagtggcgtgcatcttatgcttctccgccattaaacgcacgagacgttttaatgccagcgcatcatcgcacgcatccagcacgttatcggtgtggtggaggttgatttcgaactgccccggagaggcttcggccaccgcaccatccgccgggatcagctgtaactgggccagttcgtcaatatcattcagtacatcggcaaaatggttgaggttatcaacggaatagacctggctttgggtattacggtcgtcggtgccgggcgcgcacggcggctgcaggtagccttcggcatcgcgtttgcgatcgagtaaatagaactccagctctaccgctaccacggggaacaatccgcgctggcggagctgctgccagaggcggttgagtacgttccgcggctcaacgtcaaagggagcgccatcttcatcaaccatggtcaacaggacctggccgatgtattccggatcggctgccgagggggtcaacgtgcccaataccgggacgcagctgcggtccggttcgcccatatcctggccaagcccggcctcttccaccacgttgccgagaatatccatcgcgaaaacggacgccgggaagtagcagcctttctccagcttgctgaggctggcgaccggaatgcgtttgccacggaagcagccgttaaggtctgtgaggagtacatcgacatactgagtgttggggtaggtttcgaggtagcgcttcacttctttagcgaacgcgcttacccgtctctcttccgtctgctgaacaaaattctcaacttctacgatattggtttccatgattcaccgccgttgttttagtttttggaccctgactgaaagcgtcaaatataatgtccacccttcgaatgtgtatgcaaacaaaatgtttgtcaaatgttaaattaagtttgcaaacggctatttccactgctagattgagaaaatattgaacgatatggccgtttatcagccactggcggtcataatttagtccactttgtgagggcgatcatggaaaatataatgtacaagccagttattggcgtcgtgatgtgtagaaacaggcttaagggtcaccagacccagactctgcaagaaaagtacctgaatgccattgttaacgctggcggactgccaattgccctgccgcacgcgctggccgagccggaactgctggatgcgttagtcgataaactggacgggatctacctgccaggcagccccagcaacgtgcagccgcacctttatggtgaaaacggcgatgagcctgacgccgaccccgggcgtgatcttctgagcatggcgctaattaacgccgcgctcgaaaggcgcatccccattttcgccatctgccgagggctgcaggaactggttgtcgccaccggcgggactctgtatcgtcgtctgtttgaacagccggaactgctggagcatcgcgaagatcctgaactaccggtggagcagcagtatgcgccgtcccaccaggtggaggtgcaggaaggaggtttactttctcagttaataccgggctgcaacacgttttgggtaaactcgctacacggccagggcgcaaaaacgctgggttcgcgtctgcgcgtggaggcccgttcaccggatgggctggttgaggcggtcagcgtcaacgaccaccctttcgcgctgggcgtacaatggcatcctgaatggaacagtagcgaatacgccctgtcgcgtatgttgtttgatggttttatcaccgcctgtcagagccatgtcgccgaaaagcggcggctctgaccactacagttaaggaaatgcaaatatgagcgatgacggactggcgccagggaaacgtctgtcagagatccgccaacagctgggtctttcacagcgtcgtgccgccgaactgtctgggttaacacatagtgccatcagcaccatagagcaggacaaagtcagtcctgccatcagtacgctgcaaaagctgctgaaagtatatgggctgtcgctctcggaattcttttctgaacccgaaaagccggatgaaccgcaggtcgtcattaatcaggacgatcttatcgaaatggggagtcagggcgtttcaatgaaactggttcataacggaaatccgaaccgtacgctggcgatgatttttgaaacttaccagcctgggaccacaaccggggagagaattaagcatcagggtgaggagataggcaccatactggaaggtgaaatcgtgctgacgattaacggtcagtcgtaccacctggtggctggacagagctatgccattaataccggcatccctcatagcttcagcaacacctcggcaggtatctgccgcattatcagtgcccacacccccaccacattctgatttcttagcctgagcaggtttcaggctttcttcaggcctgccgcggcggatgtaatatttccgccgcggcgaagaactcgcagtaataatacctgcgcagcgcggaaatcttatttcctgctggcccaaagataattaacgccagtgaatggcgaagagacggttttctaccccggggacgccctgcgccctgagcagcctgaaaacgccgaaccctatattttgccgatgatgtttttaaggagtcatgatgaattttcagcacctggcttactggcaggaaaaagcgaaaaacctggccattgaaacgcgcttatttattaacggcgaatattgcgccgcggccgataataccacctttgagactatcgaccctgccgcacagcagacattagcgcaggtcgcccgcggtaaaaaagccgacgtcgaacgggcagtgaaagccgcgcgtcaggcttttgataacggcgactggtcgcaggcctctccggcccggcgtaaagcggttctcacgaaatttgccgacctgatggaaacccattgtgaagagctggcgctgctggaaacgctcgataccggcaaaccgattcgccacagcctgcgcgacgatattcccggcgccgcccgcgctattcgctggtacgccgaagcgctggataaagtttatggcgaagtcgcgcccaccggcggtaacgagctggcaatgatcgttcgtgaaccgattggcgtgattgccgcggtagtcccctggaacttcccgctgctgctggcctgctggaaactcggcccggcgctggcggcaggcaatagcgtaatcctcaaaccctcggaaaaatcgccgctcaccgccctgcgtctggctgggcttgcaaaagaagccggacttccggacggggtgttaaacgtggtcagcggctttggccacgaggccgggcaggcgctggcgctgcatcctgacgttgaagtcatcaccttcaccggatccacccgtaccggcaaacagctgctgaaagatgccggcgacagcaacatgaaacgcgtttggctggaagcgggcggcaagagcgccaatatcgtcttcgccgactgtccggatctacaaaaagcggtcaacgccaccgccggcggtatcttctataaccaggggcaggtctgcatcgccggtacccgcctgctgctggaagagagcatcgctgatgagttcctgacgttgttgaaagcgcaggcgcaaaactggcagccgggtaatccgctcgatcctgaaaccaccatgggaatgttaattgataacgcccatgccgacagcgtgcacagctttatccgcggcggtgaggccaaaagcacgctattcctcgacgggcggaaaaatccgtggcctgccgccgtcggcccgaccattttcgtcgatgtcgatccggcatcaaccctcagccgcgaagagatcttcggcccggtgctggtcgtcacgcgcttcaaaagcgaagaacaggcgctgcagctggccaacgacagcgactacggcctcggcgcagcggtgtggacccgcgatctgtcgcgcgcccaccgcatgagtcgccgcctgaaggccggctcggtcttcgtcaacaactacaacgatggtgatatgaccgtcccgttcggcggctataagcagagcggcaacgggcgcgataaatcgctgcacgcgctggaaaaattcaccgaactgaaaaccatctggattgctctggagtcttgatcatgactgaacataccactagctattacgccgccagcgccaacaagtatgaaccgttcccgacgctggaggaatcaatcaactgtgatgtctgcgtcgtcggcggcggttacaccggcctctcctcggccctgcatctggccgaaatgggttacgacgtggtggtgctggaaggcgcgcgtatcggcttcggcgccagcggccgcaacggcggacagctggttaactcctatagccgcgatattgacgttattgagaagaactacggcccggatgcggccaaaatgctcggcagcatgatgtttgaaggcggcgatattattcgcgagcgcatccagcgctaccagatccagtgcgattaccgcccaggcggcctgtttgtggccatgaaccataagcaaatggaaacgctggaagagcaaaaagccaactgggagcgctacggcaatacccaactggagctgctcgacagccatgccattcgtcgcgaagtagacagcgaccgctacgtcggcgccctgctcgaccacagcggcggccatattcacccgctgaacctcgccatcggcgaagcggacgctattcgtcttaacggcggccgggtgtatgagcagtcgccggtgacccgaattcagcacaccagcccggcggtggttagtaccgctcgcggccaggtaaccgcgcgctacgtgatcgtcgccggtaacgcctatctcggcgacaagcttgagccggaactggcgaaacgcagcatgccgtgcggcactcaggtcgtgacgaccgcaccgctgccggaagcgctcgcccgctcgctgatcccgaaaaactactgcgtggaagactgcaactacctgctggattactaccgtcttaccggcgacaaccgcctgctgtacggcggcggcgtggtctacggcgcccgtgacccggacgacgttgagcggctgattatgccgaagctgctgaaaaccttcccgcagttgcagggggtgaaaattgactaccgctggaccggcaacttcctgctgaccctgtcgcgtatgccgcaattcggccgtctggataacaatatttactacatgcagggctacagcggtcacggcgtgacctgtacccatctggccggacgcttgatttcagaactgctgcgcggcgatgccgagcgcttcgatgccttcgccaaactgccgcactacccgttcccgggcgggcgcagcctgcgaattccttttaccgccatgggcgccgcctactacagcctgcgcgaccgccttggggtctgatttgccgttcggttccgtgattaacttttgctaaagggtgtttattatgagcaacaatgaattccatcagcgtcgtctttccgctaccccgcgcggcgtgggcgttatgtgcaacttctttgcccagagcgcgcaaaacgccacgttgaccgatgtcgagggcaatgaatatatcgatttcgccgccggtatcgcggtgctgaataccggccatcgccatccgcggatggtcgccgcggttgaacagcagctacagcaatttacccataccgcctatcagatcgtgccttatgaaagctatgtgtcgctggcggagaagctcaacgaactggcgccggtcaaaggcccggcaaaaaccgccttcttctctaccggtgcggaagcggtagaaaacgcggtgaaaatcgcccgtgcccataccggacgccccggcgttatcgccttcggcggcggtttccatggccgtacctatatgacgatggcgctaaccggtaaggtcgcgccgtacaaactgggcttcgggccgttccccggctcggtataccacgtgccgtacccgtcagcgctgcacggtatcagcaccgccgattcgattaccgcccttgaacgcctgttcaaagccgatatcgaagccaaacaggtggcagcgattattttcgaaccggtacagggcgaaggcggctttaacgttgcgccgaaagagctggttgccgcggtacgccgcatctgcgatgagcacggcatcgtgatgattgccgatgaagtgcagagcggcttcgcccgcaccggcaaattgttcgccatggatcactatgccgataaaccggatctgatgactatggctaaaagcctggcgggcggcatgccgctttccggcgtggtcggtaacgcgcagatcatggatgccccggcgccgggcggcttaggcggcacctacgccggcaacccgctggcggtggcggccgcgcatgcggtgctggatatcattgataacgaagcgctgtgcgagcgcgcgcagttcctcggcgagcgcctgcaggcaacgctacaggaagttaagggctggtgtccggcgctggtggaagcgcgcggcgtgggttcgatgatcgccgccgagttcttcgacccggcgaccggcgaaccttcggcggcgattgcgcagaaaatccagcagcaggcgctggagcagggcctgctgctgttgacctgcggtcagtatggcaacgtcattcgcttcctctatccgttgaccatcccggatgctcaattctcccgcgcgctgacgattctgcaaagcgtcactcgtctgtaacgccctccgccggcggcgctggtcgccggctgttttcctcgctgctgacgatacactgctgggataatgctgctgaaaatagtggcgcagaaactccacggtggtgcgaattttggctgaggtcgccagccgcgacacgtagaccgcccagacgttggcgggctggaagtagtccggcagcacgtgcaccagatggccgctggcgatattttcactgacatcccaccatgagcgtaacgcaatgccctgcccatccagacaccactgatgcacaatctctccatggttggaggagagcggcccggtcactttgatcgcgtgctgaccctctttgctgtgcaattgccagacgccaaacggatggtcgcgctctttgatcaccaggcagggtaaggtagccagatcgctaagctgcttcggctgcggatggcgggcaagaaactgcggtgacgcgcagagaatacggtggttggtcgccagcttgcgggcaatcagattcggcgcgatatcgtcgccgacgcgaatatcgagatccaccccttcattgactaaatccaccagccggtcctggacatcgaagcgcagctcaagttgtgggtactggcgcgccagcgccgacagcgccggcgccaccacccgacggccaaaaccaaagctgctgataatacgcagcgttccctgcggtacctgacgcacgtcggaaagctcgtccatcatctcatccacatcctgcagaatgcgctgcgcccattcgtagatccgctccccctcttcggtaatggtgacccgacgggtggtacggtgcagcaacatcacatgcagggtttgctccagcagcgaaacccgcttgctgacgaacgccggtgagacgccaagctcctcggcggcggcggcaaaaccagcccggcgagcgaccagcatgaacacgcgtaaatcatttagcagcggcagattattcatgatctgtgttttatgtttcaccagttagcgtgattaattatgaaccagtcaattataggataggcaggtggtcaaacatcatcgctaaaaagtgagaaccggaatgaaaaaaacctgtcgtattgccgccatccccggtgacggaattggtaaagaagttctgcctgaaggtattcgcgtgctgcaagccgccgcgcagcgttgggatctgtcgctgagcttcgagcagatggagtgggcaagctgcgaatattacgcccatcacggcaagatgatgccggacgactggcgcgagcagttgcagggcttcgatgctatctatttcggcgctgtcggctggccggataccgtccccgaccatatctccctgtggggttcgctgctgaagttccgccgtgagttcgatcagtacgtcaacctgcgcccggtgcgcctgttccccggcgtcccctgtccgctggcaggtaaaaaggccggcgatatcgatttttacgtagtgcgcgaaaatactgaaggcgaatattccgcccttggcggtcgcgccaatgaaggcaccgagcatgaagtggtgattcaggagtcggtcttcacccgccgcggcgttgaccggatcctgcgctacgcctttgagctggcgcaaagcctcccgcgcaaaacgctgacctcagcaaccaaatctaacggtcttgcgatcagcatgccctactgggatgagcgcgtggaagagatggccaaaagctatcccgagattcgctgggacaagcagcatatcgatattctctgcgcccgcttcgtgctgcagccggaacgtttcgacgtggtcgtcggctctaatctgtttggcgatattctgtcggatctcggcccggcctgtaccggcactatcggtattgcccctcggccaacctcaatcccgagcgtacctttccgtcgctgttcgagccggttcacgggtcggcgccggatatttacggtaaaaatatcgccaacccgatcgctaccgtttgggccggggcgatgatgctcgatttcctcggcaacggcgatgagcgctatcacgccgcgcataacggcattctggcggcgatagagcaggtgatcgccagcgggccgaaaaccccggacatgaaaggcaacgcctcaacgcagcaggtcagcgacgctatctgcaaggccattttggcgtaattaccccggccgcccccggtggcgttgcgcttaccggggctacaatggcacgagaatatcgcccgggtaaggcgtcgccgctacccgggaaaactcgcgccaactcccctctctcctctgaatgcagaaaaccccacgattgacaagtgaaccgcatcacagcggcaaactttattgattcctgaaaggaaagaacctgcgccaattcaccttttattatttccgttccgtgttttattgcttcacgaatcggccaattgtttaattcatgtaacaaagaaataatccaattgttaatagcattttgctacgaaccctgaccctacagcgtgataacaacgacaggctaaagccaccgacgggcaagcatgcccaggagatcactcatgttgagcaacgtaaagaaaaaagatgtgccgctgattgtcatcagcctggcggccattgttttcatcgccgctacattaagtctcttccccaacaaaccgcacaggcggctaattcgatttttaacggcgttacccgcctgctaggttccgcggtacaggtactggtgctgctggcgctgggactggtgttatatctggccaccagcaaatacggcaatatccggctcggcgaaggcaaagccgaatacagcactctctcatggctgtttatgtttatctgcgccggactcggctcctctacgctgtactggggtgttgccgagtgggcttattactaccagacccctggcctgaatattgcgccgcattcagcaaaagcgctggaatacagcatcccgtactctttcttccactggggcattagcgcgtgggcgacctacaccctcgcctcgctgatcatggcctatcacttccacgtgcggaaaaataaaggcctcagcctctccgggatcatttcggcgatcaccggcgttaatccgcagggtttctggggccgcctggtcgatctgatgttcctgatcgccaccgtcggcgcattaaccatatcgctggtggtcacagccgccaccttcacccgcggcctgtcagcactcaccggactgccggataacttcaccgtccaggcgtttgtgatcctgctctccggcggcattttctgcatgagttcatggattggcattaacaacggcctgcagcgtctgagcaaaatggtcggctgggggcgttcctgctgccgttggtggtattactggttggcccgaccgaattcatcaccaataacatcatcaacgccatcggtctgacgacccaaaactttctacagatgagcctctttaccgacccgctcggcgacggcgcctttacccgcaactggaccgtcttctactggttgtggtggatctcctatacccctggcgtggcgatgttcgtgacccgcgtctcccgcgggcgcaaaatcaaagaggtcatttggggactcattctcggcagcaccgccggctgctggttcttcttcggggtgatggaaagctatgccatgcaccagttcgtcaacgacgtgattaacgtgccgcaggtaatgcagaccctcggcggcgaaaccgccgtccagcaggtactgatgtcgttgccggcgggcaaactgttcctcgccgcctatctgtttgtgatgattgttttcctcgcttcgcacatggatgcggtggcctacaccatggcggcgaccagtacccgtaacctgcgcgaaggcgaagatccggatcgcggcatgcgcctgttctggtgcgtggtgatcacccttatcccgctatcgattctgtttaccggcgcttcgctggaaaccatgaaaaccaccgtggtgctaaccgccttaccgttccttgccattttactgatcaagaccggcggcttcgtacgctggctaaaacaggactacgcccacgtgcctgtccatcagatagaaacccatacgcccgagccgatcgttaaagccgagacgctgccggttggcgcggtactcaaaggcgacggccagtcgctgtaaaaaacgcttactgacaataatcacaaggtgaccctacatgagcaatttaagccctgactttaccctgccgattaatttttgcgccaatccgcaggatacctggaccattccagcccgtttttacactgacagccaggcgtttgagcacgagaaagagcgtatcttcgccaacagctggatttgcgtcgcccacggcagcgaggtcgccaggccgaacgattacattacccgggagatcatcggtgaaaatatcgttatcgtccgcgggcgcgacaacattctgcgcgccttctataacgtctgcccgcaccgcggccatcagttgctgagcggtgaaggtaaagccaaaaacgtgattacctgcccctatcacgcgtgggccttcaagctggacggcaatctcgcccacgcccgcaactgcgaaaacgtggagaatttcgatagcgaaaaagctacgcttgtgccggttcgccttgaagagtatgccggctttgtgtttatcaatatgaacccgcaagcggagagcgtggaaacgcagctaccggggctgcaggacaaagtgctggaagcctgcccggatgttcatgagctgaaactggcggcccgctttaccacccttaccccggcgaactggaaaaatatcgtcgataactatctggaatgttaccactgcggtcctgcgcatcctggcttctcggattccgtgcaggttgaccgttactggcacaccatgcacggcaaatggacgctacaatatggcttcgccaaaccctccgagcagtcatttaaattcgaagaaggcaccgacgccgcgttccacggtttctggctatggccatgcaccatgctcaacgttacaccaatcaaaggcatgatgaccgtcatttatgaattcccggtggatgaagagaccaccctgcagaactacgacatctatttcaccaacgaagagctgaccgacgagcagaaagcgctgattgagtggtatcgcgacgtgttccgcccggaagatttgcgtctggtggaaagcgtgcagaaagggctgaagtcccgcggctatcgcggacaggggcgcattatggcggataacagcggcagcgggatctccgagcacgggatcgcgcatttccacaatctggtcgcccaggtattccagccgtaatcattgaaggagttggccatgtccgtatttcactctgaactgtttcgccagcaggcgttgattgccggaagctggcgcgacgccgccgacggtacgacgcttgccgtcagcaatccctccaccggcgtgacgctcggcctgatccccaatatgggccggacggaagcgcagcaggcggtggatgccgccgctaccgcgctgccggcatggcgcgcgcttaccgccgcccagcgcgccgccttattgaagaactggcaccgcctgatcctcgaaaacaagagcgcactggcgcagataatgaccgccgagcagggcaagccgctggcggaagcggaaggcgaaatcgcctatgccgcctcgtttatcgagtggtttgctgaacaagggaaacgcgccaacggcgaaataatcccctcccccggcgccgataaacgcctgatggtgatccgccagggcgtgggggtctgcgcggcgatcaccccgtggaacttcccggcggcgatgatcacccgtaaggccggcccggcgctggccgcgggttgtacgatggtgataaagcccgccaacgaaacgccgtttaccgcgctggcgatggcggaactggcgaatcaggccgggatcccgcagggcgtcattaacgttgtcaccggccagtcgcgtgagattggcgcggtgttcaccggcgatgaacgggtgcgtaagctctcctttaccggttcgaccgaagttggccgcgtgctgatgcgccagtgcgcggaatccatcaaaaagctctctttagagctcggcggtaacgcgccgtttatcgtctttgacgacgccgatatcgataaagcggtcgagggcgcgctgatcgccaagttccgcaacgccgggcaaacctgcgtttgcgtcaaccgcttctatattcatcgcgccgtctacgaccaattctgcgataagttcgtcgcccgcgtcgccgccctgaaagtgggcgatggcagcgagtccggtgtgcagattggcccgcttatcaacgccgacgccgggcgcaaagtccagtcccttctcgacgatgccctgagccgtggcgccacgctgttaaccggcggtaaagcgcatccgctgggcggtaatttcttcacccctacggtgatcggcgacgtacagccggggtcactgctgctgcaggaagagattttcggcccggtggccgcgctggtgaaatttgaggatgagcagcaggtcatcgagcaggcgaataacaccatctacggcctcgcctcctatttttacagcaacgatgccgcccgtatctggcgcgtctccgagcagctggaatacggcatggtcggtatcaataccgggctgatttccaacgaagtcgcgccatttggcggggtgaaacagtcgggtcttggccgcgaaggctcggaacacggtatcgaagattacctggagatgaagtatctttgccaggggttgtaaatgtattctcccggcggcggctctggccacgccgggatttttgatggagttccgcgatgtctgattatcaaatgtttgagacgatcgttcgcgatgttgaacagatcaccgcccaggttaagcgttttacgctggtatcgccgaccggcgccccactgccgggattcagcggcggcagccatataatcgtccagatgcaggatggcgagcagcgctacagcaatgcctattcactcatgagctcgccgctggataccaccagttggcagattgcggtgcgtcttgagtcgccttctaaaggcgggtcgcgttttatgcatcagcaggtgcgaccgggtgataccctgacggtgtccacccccaacaacctgttcgccatcgaaccgcaggcgcgcaagcatctactgatcgcaggcggcatcggcattacgccgttcttatcgcatattcatgaactggaacagcggcaggccgactggcagctgcactactgtttccacgacgccgacagtaacgctttcgtcgatgcgctcagcgccgcgccgtggcgcgaccgggtcaatattcacatatcagcgctcggcagccgtctcgacctgtcgcgcctgttcgccgacatcgagcccggaacccatgtctatacctgcggcccggctgcgcttaacgaggcggtgaaagccgccgccgaacggtatcaggttcccgccaaccagctgcactttgagcaatttatccttgaagataaaggcggagaggcatttaccctggtgctggcgcgttccggacgcgaatttaccgtgccgcaggatatgaccattctgcaggtgatcgagaataacaaagcggcgaaggtggaatgcctgtgccgcgaaggggtgtgcggcacctgcgaaacgatgattctggagggcgaagccgaccaccgcgatcagtattacagcgatgaagagaaagccagccagcagagtatgctgatctgctgctcacgcgctaaaggcggccggttagtgctggatttatagcacgcgctccggccagcgccgctggccggagagacaatcacagttccagctcgcaccacaataagaatggactgacctcgcggaattattccaacgacctaccactccatggcgacgagatcagtggcgcggatactaaagcgttcgctggtagcgtaattagcacaatgtgctacatcagccgctaataaacgcatttccgcgcaaaatcaatttttatcccagctgaacgttcagcttttcgccgctacgcgcaaaatatccgcgcctggccaataacctccagacgaaccgtggcgccggcttgccaggcggcctggctgacggttttcaacaccaacggcatcgattgccccgccaccgtcaccgtcagcgtcgagatatgaccggcgaaatcgacatccacgatacgaaaagcgctctcctgcggcgcgcacggcgaaacccgcagttgttccggacgcagcatcacgcgcccgcggccgctggagtgaagatcgtcggtcggcaactcgccgatggcgcaacgcgcgcgcccttccgtgagctcggcgtcgagcaccagcgcgtcaccaagaaacagcgcggtggcctcgtcaaccggacgcgaatagacctcgaacggcgtccctacctgagcgaaacgcccctgtcgcatcaccgcgacctggcttgcaaacgacagcgcctccgtctggtcatgagtgaccaggatcgaggctacgccagcctcggccagcagatcggcggtggctttacgcgtcgccgcccgcagcccggtatccagcgctgagaaaggttcatccagcaacatcagggatggccgctgggccagcgcgcgcgccagcgcaacccgctgttgctggccaccggaaatttcatgcggccagtggttcgctaatgccgcgtctaacgccaccatctccatcagcgcagccacccgacggcgtttctcctcgcggctacaatccagcccccaggcgatattgtccgcgacgttaagatgcgggaacagcgccccttcctgcggcacgaaaccgatcccgcgctgatgcgccggcacaaacacgccgtcggcaaacagggtgttgccctgcaaaacaatgcgcccgttatcgggggtttcaaaaccggcgagaattcgcagcagcgtggttttaccggaacccgacgggccgacaacggcggtacggcttcccggcgccacggtaagattaaggttatcgagcaccagtgcgtcggcgaaagatttcgagatagaagacaattccagcatgttacaaccctgcaatttttttcgactgcacataaagaaccgccgtcagcggcagcgaaatcacgatcatcagcatcgcatagggcgctgcggcgacgtagtcgatctcgctggttaacgcccaaaaaccggtcgacagcgtgcgggtgcctagcggcgacagcagcaacgtcgcggtgagttcattgctcacgccaagaaacaccagcgcggcgccagcggccgcccccggcgcggccagccgcatggtgacgctccataaggcgcgggccgggctgcgcccaaggctacgggcgacgttttccagctcaaccggcgcctgggcgatacccgcgcgcaggttaatcagcgctcgcggcataaacatcagcaggtacgcgaggaacagggtcacttcagtctggtacaccggacgagcgtaatggatagtcaccgtcaccagcgccagcgcggtgacgatacccggcagtgagctggtgatgtaattacagccttccagcagacggaacagccgacgcggataacgcacgccgagccaggcaattggcaccgcgcaggcggtggtaagcagcgcgccgcccgccccaacatcagggtctggcgcagcgaatgccagagatcggcatgcagccagttctctaccccaccaagccatagccagcggcacagcaccagcagcggaacgcccatcgccagcatgaccagcgtcagcagcagcagttgcgcgccccatgcggccacgttgctcaacggacgacgtttctgttcacgcgccgcgccggcgccgatgcgcgcgtaacgcgctttgccgcgcgagacgctttccagtagcagaatcgccagacaacacagcgccagcacccccgccagcatatttgccgccgggccgctaaaggtagactggaactggtcataaatggcggtggtgaaggtatcgaagcgaatcatcacatacaggccatattctgccagcagatgcagcgccaccagcagcgcaccgccgcagatagccaaccgcagctgcggcagcaccacgcggaagaaaaccttccacggcggcgtacccaacgaggcggcaacatcttccagcgtcggatcgagacgacggagcaccgccgccaccggcatgtagataaaaggatagtaggccagcaccgagaggaacaccccggcggacaggccatgcagcgagggaaccgcgctgacccaggcatagctctggacaaatgcaggtatagccagcggcgcgaccgccagtgccgaccacagctgacgcccggcaagcgcggtgcgttcagtgagccaggccaccgccacgcccagtgcgatacagatgggcactgccagcagcgtcagccatagcgtattgctgagcaactcgcccactcgcgggcgaaacaccagtgctttaatggtcggccagccggtctcaatccccacggcggccacaaaacctaacggcagtaacgccattactgaaaacagtacagctaaggcaaccatcggaaatgcaggacgcctgcgctcgggcaggcgtcctgttttctttccgagtaccagactcaggacagacatagataaatcacttcagcatcaaattacagcaggccagcctgggtcatcaggtcgatcacttttttgctattcagcgttgacggctctaccttcggcgcgtccagctctttcagcggcgtcagtttcgggttagaggcggcattcacgcccaccgcatattcgaaggcattattggtacgaagctcatcctgaccctgcttgccggtgatccatttgataaaggcctgcgcctgctctttatgtttgctggacgccagtacgccgccgccggagatactcacgaaagcgcccggatcctggtttttaaagtaatacagcctggtgtttttgctgttctcgccggttttcgcctggtcaacaaagcggtaatagtggtagatcaccccaccgtcgatttgtccggcgttgaccgctttcatcaccgtgctgttgcctttgtaggccacgaagttcgttttcatcgccttcagccagtcgagagtcgctttttcgcccttcaatgccagcatggcgctgacgatggcctggaagtctgcgcccgatggagaggcggcccagcgccctttccactcaggtttcgccagatccatcagcgaatgcggcagctgagattcgctgattttcgccgggttatagacgaaaacggtgctgcgggcggcaatgccaatccagcggccgtgttcaggacgatactgcggcgcgacctgattcagcgtcgcggcatcgagcggcgcaaacagtttggcattatcaaccagcaccattgaaggcgagttttcggtaaggaagacatccgccggcgaggctgacccctcctgcaccagttgattacccaattcgctatcatcgccgttgcgcagcgtgactttaataccggtttctttggtaaagccgtcaacccaggatttcaccaggttttcgtgctgggcgttatacaccacaatcccgtcgccattgtcagcagccataacctgcggagcggtaaacagagccgaagcagcgagcatcgccgcgcaatatgccgataagcggaaattcataagctaatccttagtatgggtagtcgaaaagccgtggagaaaccgggttggctggattaaatcacagaggaatgtgaatgataatgaaaacaattaccatcattttaaaaaagtgaaaaacaccgcgaattagaatttcctgatgacaaaatgcttatttcaacgcgcgaccgaaacaaacattaagacaacattaagccagcaggtttaaatattatcgctgtttaaaatcttgatcgtcttcacagatcaagcccgcgacacggcaacggaccgctgtttaccggttgaaatcatcactcttgccaataattttaaatgagaatgatcttgataatcattctcaatatcacatatcatcctgttccagcagcaagatacgaagaaaagacgactaaaaagccgaaaatggatattttatgtttaaggaaccccttttaaagactctggttataggctgcgcgtggttactgagcgcctgtcacagcccggtttatcccctctcccctgccggggagcgcgcgctggtagagaaggcggatattcgtgataccgccagcggacgctccctgacgccgcaacaattgctgaaccaactcgctcagacgccgctggttattgtcggcgaagaacataccaacgctcagcatcaccagattgagcgctggctgctgcagaaccttcacacccttcgcccgcagggcagcgtgctgatggagatgatcgacctaagccagcaggaggctgtcaatcgggtcaagcgggccagcctcagcgggacgaccgtgagcgccactcgcgcggcggaaaccctgagctggaactccggctggccgtgggcgctttatcgcgacgtcgtgatgaccgcgctgcaagcgccttatccgctgctggcagccaaccttagccgccagcaagtgagcgacatctatcagcatcccacgtttccccgcggaacgctctccaacagcgcacaggtacatgaatcgctatcggccattatctatctgatgcataacgggcaaatcgatggcgagcaggttacctctatgctcgctatccaacagcagcgcgatcgcctgatggcgacgcaaatgcaagccgcgccgcgcccggcgctgttaattgcaggcggctatcatgcggctaaagatattggtgtaccgctgcatctggccgatctcaaggcggaaaaaccgctggtgttgctgctgaccactgacggcaccacgctgacggcgaagcaggctgattacatctggtcggtggcggcggaaagatgaatatccctctctccacgccattggtagcgtcgcgcccccgctggttcgtggggacaacggccagcatgctgggccatctggcgctggcggtgccttttatcattcatttcgcctcgccgccggatgccgcgccccctgccgcagtgatggtggaatacacgccggaactggaagtgtcatttattcatcccgagctgccgccgggcgtcacccagcagcgcaaagtcgaggcgatgaccgaacaggaaacagcagcggcgaaagaggcgccgaagctgctcattcatgacaatgcgcaaataaagctgtccgccagcaaacccgaaccgcagcggaaaaagaaaatcgaggttaaaaaacagtcccgccgccagcagcaagaggaaaagggtaactcaaccatcaccagcttcgccgcgcccccggcgcctgccgccctcactcagcgcaccaccgcgccgctcgatagcgatgccgcgcgcctgagcgacaacaagatcagttgggaatcgctggtgaaaggcaaaatcaacaaaatgcgccactatccggaagatgcgcgccgccgtaaacgtaccggtaccgtcattattaccttcagcgtcaacgaacgcggcgaggtgttgcaatcgcatttagtgaactcttcagggacccattcgctggatcgcgccgcgctgatggcgctggaaaatgcgcatccacttccgccgccgccaaaagagctgctgcgtaacggtataaataaggtcaccctgccggtggaattcggtttattaaaaatataaacccagggttccctgttatttattcaggcatcctggatgttatttataacggtcactgaccgctaataatttttattttgggcaatgtgtcatcgcacttagcaataagcgcgatgcacgctgctgccctttttgtgcgttaaatatttattacctcaggattggattatggaaaaatcacaaataatcacggggctcgttaccgggctacttatcgtcaacggccaggctttcgccgccgaaagcgaaggagaatcggtattctctcctatcaccattaccgataacccgctggcggaaaatgcaggccaggttggctcctcagaggagagctatacccgccctggcgcttacagttcgcgaacgctcaataagaatctgcaaagcctcgacgcctcgctgcgcagcatggcgggcacctatacgcaaatcgacccactacagggcaccatcagcgtcaatattcgcggcatgaacgggctgggccgggtaaacaccatggtggatggcgtcacccaaaccttcttcggcatggcgccggctaactatcacggcggggcgaataccgccgccggggtgccgcttgaccccaacttcctggccgaagtggatatcacccgcggcaacagcgccggttcgcaaggcgtcaacgcgctggcgggcagcgccaatctgcgcaccatcggcatcgatgatgtgttaaaaccggggcatcaggtcggcctgctgtcgcgtttttccgtgggcgataacggactcggccgcaccggtatggtaacggtagccggcaaaaccgacaccttcgataacggtggcggccttggcgcgctgctcggcatcagcggcacccgcacctatgcaacctataaaaacggcggcggacgcagcagcgaagagtttatcggcgaggataataaatatctgcgccaggagccgcgctcgcagctgtataaaatcaatttcaacgtcgatcaatttaaccgcttcgagttttccgggcgtaattaccgcaatagctttacccgtcgcgatattagcagcgacgactactatctgcgttataactacgcgccgctcaatgaactggtcgagttcaatgtattagccagcacaagccgcggcaatcagtcgtataaaccggagtcgctgtataattttaacgactcctcgaccaccaataagtccaacgcgctggacatgaacaataccagccgctttcgtattaccgacgatctgtatgccgctttccagctcggcggcaaattaatggacacccgctattcccgccgcttcgtgcaggataccgagaccgaccataacgcctttgccccggcgggcaaacagaagatcgcctcgctctatagcgggctgacattaaacaaggatatttatcagctcgatcttaatctcaactatacccgtagccgggtacagggctataaaccggcctgtgcagataacgaaaagtgcttcccgcaaggggcaacccaactcaacgtcaaagacaacggttttaatccctcggcgaccttctccgctcaggtgacgccatggctgcagccgtttgtcagctggagccgttcctcgcgcgcgccgaacgtccaggaagtgttcttcgccaacgagggcggcgcatcgatgaacccgttcctgaagccggaaaaagccgagacctgggaggccggttttaacgttatcaaacaaggattattgagcgagcaggatagcctgcatctgaaagcccttacctaccgctcgcggattaaagattacatcaccagcgaatccttcctgctgtgcagcaacggtgggctgtgtaaagatgtcgccaatgcttcgccggatttcaacgccaatatctcggttaacgtgacctcgccggtgaccaccgagggctatgagattgaagccggatacgacatcggttttgcctacgccaatgtgtcatggagcaagcagcgtaccgatcagcccacctctattgccagtacggtctatagcttcgcctatagcgaccttagcgatctccccagcagctacgccacggtggatgttggcgggcgcctgttcgatcgcaaactcaccatcggcagcctggtgaaattcaccggtaaatcaaaacgcctgagtaccgaaggcattagcctcgacaccaatacggtacctaaagagggcatgccgaatatcccgaccattatcgacctctatagcagctggcagatgaccgataacgtgctgctgcgctttagcgtgcagaacgtaacgaatcgtgactactccgaagcgctaaaccgtatgaaccagagtctcgataacgccaaagagggcgcgtctgtgaacaccaccgcccgcggccgcacctatattttcggcggcgaaatccagttctgagccctatttgtcaacaaggataaccatcatgcctaatcgcaacttgataaaaccgctggctgcgctattgctcgccgccctgctgccccacccggctttcgccatcgatccgccgccgcgggaagcgtcgcgctttgcgatgaaaaccaattacctgcaggaagctaatgaaggggtttatgagctggcgttcgacaacggcgacaacctgctattcgccgcggcgaccgaccgggttaaccgcgcggccaataaaggttatctctacgcctttaatccggccaccctgcaggttatccagcgctatgatatgccctggcgcgctttctcgttggcgatgaatcagccggcgcacgtgctttatgtcggccatacccaggcggcttcgctgcgtatcagccagttcgacgccgccagcggtaaaatcacccgcaccagtccgcgcctgagcttcccctccgacggcgtcgccgatgcgcgcttcgaacatctgcggcatatggtatacagccgcgccgctaatctgttatttgtcagctacagccatatgctgaaaacccaggacgggatgcgaccgctgcataaattgttgatgctcgacggcacaacgttacagctgaaaggggaagtcaaaggcgcctatcgcggcaccgcctacggcctgacgctggatgaaaagacgcagaagatctacgttggcggccgcgactatatcaacgagatcgatgccagaacccagcaggttgtccgcaccatcccgcttaacgcgccgcagttggccagcgcgcaaaatctgatcgttgattccgactcagggcgtattttcgtagtcgccttcgatcacgacgatcgcagcggccctcacgacggcctgtatattttcgatcttaaagacggcaaatcgctgggctacgttcgtaccggcgtcggcgccaacgcggtgcgcttcaatccgaaatacaacgagctgtacgtcagcaatttcaccagcggcaccatcagcgtcgtggatggcaaaacctggcgggtgactcatgaattccgcaccccggtttatcctaatcaaatggtgctgtcgccggacatggataccctgtacgtcggcattaaagaagggttcaatcgcgagtgggatcctgaggtatttgtcgaaggggcaaaggagcgcattctgcgcattgatttgcgtaaatcgtaatccgctaaccacctgcccggcaggtggttattagccttcgttggccagcttggcgcgcaggcgcttaatcgcctggctgtgtagctggctaacgcgggattcccccacctccagcaccgcgccgatctctttaagatttagctcctcctgatagtagagggtgaggaccattttttcgcgttccggcaaggcttcaatcgcctcaataacccgctggcgcaggctgccttccagcagatgatgcaacggattggcctcttcgtgcccttccagcagtcgttcggcattctcgccctgctcttcccgccactcatcgtaggagaacagctggctattattggtatccagcaggatttgtcggtactcggcaagggtgatacccagcgtctgcgcgagttcgctttccgtggccgggcggcccagatgctgctccagcttctgcatcgcctgggcgacttcgcgggcgttacgccgtacgctgcgcggcacccagtcgcggctacgcagttcatcgagcattgcgccgcggatacgttgcaccgcataggtggtaaaggccgttccctgtagcgagtcgtaacgctcgatggcgttcaacaacccgattcccccggcctgcagcagatcgtcaagctcgacgctggcgggcagcctgacctgcaggcgtaacgcctcgtgccgcactaacggaacgtagcgcagccagagggaatttttgtccatcacgccttcggcggtatacaaatcgctcactatttctgaaacctgcggataagagagtcagcgctattatgcgcaggggcaaaaatgccaatcgccggaaaaaccgcataaaagcgtctctatttacgacatgctccgccgttgcgccgttttgcgcctggtggcgacgggcaaaaagcaaaaaccccgccgaagcggggttgcgatgcgacagtaatcaggcgtgcgattaacgcagcagagacaggacgttctgagtcgactggttagcctgcgccagcacggaggtacccgcctgctgcaggatgttcgcgcggctcatgttggacacttcggtcgcgtagtcagcatcctgaatacgggactgggaagcggacaggttgttcacggtgctgttcaggttgttgataacagaatcgaaacggttctgtaccgcacccagggaggagcgcagttggtcaacctgggacagcgctttgtcgagggtagccagcggatcggcagttttcggcgtggtgctcatttcagcgcctttggtcactttaccggtgctgtcagcggtcgctttgaagtatttcgcatccgcgccagtaccttcctggataacgtaggatttaccgccatcgtaggatttcaggccagtggtgtcgccggtagcggttacttcttcgccaacagtggttgtcgctgaagtatcggtcagaccagtggtctcagcagccgcaatgttagtgacatcaccggttgttttatcaatagtcgctttatagtttttaccatcggtacctaccgcataaatatcacccgtagtgttatctttgagatagctggctggagcagcaccattagcttgttggttggtagtgttggtaattgtcagatctttaccagtggcaatggtggttaccgcaccgccaactttgctggtatcaataccgtcagccacgctgaatttatccagacccagagtcttcgcattgatatctttcagatcgatatcgatggtttcgccgtcgttggcgccgacctggatggtcagcttctggtcgccgctcaggactttaacgccgttgaaatcggtctgttcggagatacggttgatttcagacagacgctgggagatttcatcctggatggactgcaggtcgcttgcagagttggagccgttctgcgattgtacggtcagacgacggatgttctgcaggttatcgttgacttcgttcagcgcgccttcggtggtctgcgccagggagataccgtcgttagcgttacgggaagcctgagtcaggcctttgatgttagcggtgaaacggttggagatcgcctgacccgcggcatcgtccttggcgctgttgatgcgcagaccggaagacagacgctcaatcgccgtgcccagggaagactgggatttgttcaggttattttgcgccatcagcgacaggctgttggtattaattacttgtgccattatatgcattccttacgagtcagttgcgttcagtgcaacgtggttaaaaggttcgggcttgcttgcccacggcgtcaaccaccgtcccttctggtatcgacgtatcctctgcaacctttagccattttttgaaaaatttttgcccctccgccaatggcgaaaataacgcgctttttccctcttctattacgccatcgcctttttcactttttcggtaaactttttctccactgggccgataacgcaataagcgaataacgtcattagtaaggagaaacaccaatggcatcgatcagttccttaggcatcggctcaggactcgacctcaacggtttactggacaaactcagcaaggcggaacaacaacgcctgacgccgtataccactcagcaaaccagctataacgcgcagctaacggcttacggcacgttaaaaagctcgctggaaaaattcgataacctgagcaaggagctggccaagccggagtttttcaacagcaccaccgccaccaaacacgaccagttcaccatcaccaccaccaataaggcggtgccgggcaactatagcgttgaagtgcagaagctggcgcagccgcaaaccctgaccacccaggcgacgattaccgatcagcaggaaaaactgggtaccgctggcaatagcaaccgctccattacgatcaccgccggtaatccgccgaaagagaccacgattccgctgagcgacgaccagacctcgctgctggagatgcgcgatgccatcaacggcgctaaagccggcgtcaccgccagcatcatgcgcgtcggcgacaatgactatcagctggcgctgagttcctccaccaccggcgagaaaaacaccgtgtcggtgcaggtgaataacgacgataagctcggcgccatcctcaattacgacagcagcagcaacagcggcgcgatgaagcaaaccgtcgccgggcaggatgcggagatcgtcgttaatggcaccaagattaagcgcagcaccaactcgattgccgatgcgctgcagggggtcaccatcgacctgaaaaccaccaccaaagccggagaaccgcaaaacctggtgatcggcatcgataaaagcggcaccgccgacaaaatcaaagagtgggtggataattataattcgctgctcgacaccttcggctcgctgaccaaatataccccggtgaaaagcggtgaagcgcaaagcgccaagaacggcgcgctgctgggcgataacaccctgcgcggcattcagtcgtcgattaaaagcgcgctcagcgccgctcaggacaatccggagctgaaaggccttggcaacctcgggatctcaaccaatcccaaaaccggcaagcttgaagtcgacagtaccaagctcaataaagcgctcgacgagaaaccggatcaggtcgccaacttcttcgccggcaacggtaaagacaccgggatggccaccgaaatccataatgaaatccagaactatattaaagcgggcggcatcatcgagaactcgaccaaaagcatcaacaccaatctcgatcgcctgaatatccagatcgacactgtttccgacagcatccagaacactatcgatcgctataaacaacagtttgttcagttggataccatgatgtctaagctgagcagcacgggtaactacttacaacagcagttctcgtcccagtaacccttaatcaggtaatgaaacagcatgtataaccgtagcggcacgcaagcctacgcacaggtcagtctggaaagcagcgcgatgagcgccagtccgcaccagttaatcgtaatgttgttcgacggggcgcttaacgccctgcttcgcgcacgcatcctgatgaatcagggggatatcgccggtaaaggcctggcgctgtcgaaggcaatcaacatcatcgacaacgggttgaaaagcggcctcgaccaccagcaaggcggcgaaatcgccgataatctggcggcgctgtacgattatatgaagcgacgcctgatgcaggccaacctgcataatgacgaagcggcgatcgtcgaagtggtcaagctgctggagaatatcgccgatgcctggcggcaaattgggccaaactatcaacctgctcagggtacattgtgatggaacgccaacagcagcttttagccgcctatcagcagatccataccctgagcagccagatgattgccctggcgcgcgccgggcaatgggaagcgctggtggaaatgcagtttgcctacgtgacggcggttgagaaaaccgccgaatttaccggcaaagcggggccatcgctggctctgcaagagatgctcaacgctaagttgaaacagataatcgacaacgaaggggtattgaaagggctcttgcagcagcggatggagcaattaaaaacgctgatcgatcaatccactcgccagaacgcggtcaacaccgcttacggccagttcgacgatcgttcgctcctgcttggcgaactgcagtccgataatgtggccgccattaagagcaaaagcgaagaattacaataacaacaaccttacagcctgatattccggccaggaagcgcatgatggggctcgccagggcaatgctgagtgttgcctggtaagccatcggcgggttttacaggagtgaataagcaataatatataatcaattatttcatttacgcttcatacattcatcaattaaatattctaaacatcgcgccagctaaaataagccactcacaggcttagggaaatatgcctgtaaaataatctgtgttatcttgaccgggtaaatatgatattactcacgggataaaacatggatgtattcttcgggaaaacgcgtttttccaattactttatgaccatggcgcaagctgaaactaacggattaatgaataccgcgcaggcggtttctgcttatcaccttcatgatcccctgacccgaatcaggtttcaggaaagtgttaaaagatttgccctttcacagattaacattatccgtaatagcagtgatgataagcagtgccagcagtgcattcaagcaatcaggcaagagcgggaaaatctgcttattcaggacagaatgttgcgaaccggtgaagctatgctcactgcctccgtgcggttctaccgggaaaatgaaaaaatcatcggctatatcatcgacggtatcggtgttgttcttggcggtatgcaggttatcggaggaataggactagtgcttggttcagtaggtaccggaaatgtcattggtattgtagctggagcaacgcttgtattccatgggcgggaacgatacgagagcatttaggtaaagataattttgcgattaacgcatatcaggatacagcctcctttttaggatttgataaaaaagtagggttactggcctatcaggttgttgatctttcaacgtcactttatggagcctttaagctagcattaaaacccgaagcatggcggctattttattataccggaccggacttttatcgaaaaataactacgatgagcgcccctgcgttggctcttaaaggtgtttcatcaacggtaaaaggaatacaaataggcaataccatatatgaaattgataataagtaatcactcgattttcaagtagataagatatgctttaaaagccatcgggaaaggtgttaatttccaaacagcaatcaggataaaaataatgattagcggataagtaaaatcattactttcgaagttaaaaatccacgaaacgactatggcaaaggcaatacaaacaacaataacgccgccccaaaaacgttttcgtaaactgtcgatcaaagtagcataggtttcattgttactttcttgccgcgtcaggatttcacgtaagcgggcaatctctttatcggtgaagccatgttcacgaagatcatcttctgttagctgctttcccacgcaggctcctccatactggttatatatttctccaacgcttccgactgaagatacccgttatatcgctcaaccaaatgctcaggtgtcatgcagacagtcggggttaccacagtccgtggaatattgcccctgaagttgccaggggtcaagcgcgcgcgttcatgccatacaacgatttcacgcctgagccgccagaatgctgtcagtttaaaggagatgcgttacgctaccgccccgccttcatcttcccaacggcagaccatatggtacagttcccgctcgtcgtattcatcgtggaatctattcacaacaccctccagaagaccgttagccatgctctaagtttagtcactgttaaggagggagacagatcagagggagttgaaacggcggttactcgctatcctgtcgccaggtttcatgaatcatcgctatcgcgacaaaagctaaaacgacaaaaaatacaacggtctgaagccacagcataacgcctccacggagcaaaatttgcgcggattatttgccaccgggccgggaaacgatagtgaattgccatccaaatttaaattttcgccttccgcagataagaaaaacagtggcaacgactggtgctacgccaacgctaaggtaacaatcgtcgctatcgctccccaaaaggccaacaaaccgagaaaaatcccaatccaaaccttacgccgcaactgatagtctacttttccggacatctgctattccaaattagaattattttggcaagaccatacagtttgtaatgctagtagtcagatcgtttgtgacgatcgatgaacagctattgatctgtatcccctatcaatagtaatgatacttcagacccattcattcaccggatgaaagaacaaaatcaatgcagaggcgagcagttttttgccgttgtcgccgtaaatagacaaaaccgccagcgttagcatagcggtttgcaggaagcaattgcgccgggattgtatgactaaaccggcatattcatgatgtcctgataggccgccaccagcttattgcgcacctgcacgcccatctgcaacgaaaccgatgatttctgtaaatcgaccatcacatcattcaggctgatacccggcacgcccagctcgaagttttgcgcctgtttacgcgcggcctgctgggtatcgctgattttacccagcgcagcggtgagttcactggcaaaactgactccctgcggtacgctattctgcccgttttttcccgcctgaatcgccatcgcctgcatctgttgcagtacgccttcaataccctgaatcgccatcttttcctcaatactgtcgtgatcgccaggcgctatttcaccctgtacttctccaatgctgcacaccctaacacagcgatttttgcttaaagcggttaattaactgcaaaaaacccggcttatcgggcaatcagaatcatccgataagacgaataatggcctgcccagaaatgggagcgtcgctattgagaaaagatgtgtatcagggagtctgttttgtcacataacgctatccataccgttcgtcagcacgccagcgcgcgtcgccgcctgaacgccagcgaaggataccgccaaccatgagtgcctcgttatccgccggcgaaagccgcgacaacggcctgcaggccatctggagccgtctgcgcgccaatccaaaaataccgctgctggtggccgcctccgccgctatcgccattattgttgcgctgctgctgtgggcgaaaagcccggattatcgcgtactgtacagcaacctgaacgatcgcgatggcggcgctattgtcacccagctgacgcagatgaacatcccctaccgcttcgccgagaatggcgcggcgctgatgatcccggcggagaaagtgcatgaaacccgtctgcgtctggcgcagcaggggctgccgaagggcggcgccgttggcttcgaactgctggatcaggaaaaattcggcatcagccagttcagcgaacagattaactatcaacgcgctcttgaaggcgaactctcacgcactatcgagtcgctggggccggtgcagaatgcgcgggtgcaccttgcgctgccgaagccctcgctgttcgtccgcgagcaaaaatccccttccgcctctgtcaccctgacgctacagccgggtcgcgcactggatgatggccaaatcaacgctatcgtctatatggtatcgagtagcgtcgccggcctgccggcgggcaacgtcaccgtggtcgatcaggccggacgcctgctcacgcagtccgacggcacagggcgcgacctcaacgcctcgcagctgaaatatgccagcgaagtggaaagcggctatcagcgacgcattgaaacgatcctggcaccggtggtcggcagcgccaacgtccgcgctcaggtgaccgcgcagatcgatttcgcctcccgcgagcagaccgacgaacagtaccagccgaaccagcagcccgagaaagcggcgatccgttcacagcaaaccagcagtaacgagcaaatcggcggaccgcaggtgggcggcgttcctggggcgttatccaaccagccgagcgcgccagccaccgcgccgattgaaaccgctaaaccggcggctaataacgccagcaacgcgaccaacacccgtagcgccgcggccaacagcggcccgttaagcacccgacgcgacgccaccaccaactacgaactcgatcgcaccatccgccatacccaacaaaaagccgggacggtggaacgcctgtcggtcgccgtggtggtgaactacagcctcaacgccgaaggtaaagcgcagccgatgagtaaagaacaactggcgcagattgaagcgctggtgcgcgaagcgatgggctactccagcacccgcggcgatagcctgcaggtggtcaatacgccgtttaccgacaatcagatgaccggcggcgagctgccgttctggcagagccaggcgtttatcgatttgctgctcgaactgggacgttaccttctggtgctgctggtcggctgggtattgtggcgcaagctgattaagccacagctgcagcagcgtcaggccgcacagcaagctgcggtcgccgccgccagcgcgccggtcgctaaggcaaacgacagccataaaccaagcaatgaggagctggcgctacgtcgtaaatcgcagcagcgcgtcagcgcagaagtccagagccagcgcatacgcgaactggcggataaagatccgcgggtcgtcgctctggtaatccgccaatggatgagtaacgaactatgagcctgaccggaaccgataaaagcgccattttactgatgacgctgggcgaagaccgcgcggcggaggtgctcaagcacctctcctcccgcgaagtccagcttttgagcggcaccatggccggcatgagccaggtctcgcataaacagctcggcgagatcctgtctgaatttgaagacgatgccgaacagttcgccgccctgagcgttaacgccagcgactacctgcgatcggtgctggtgaaagcgctgggcgaagagcgcgccgccagcctgctggaggatattctcgaatcccgcgaaaccacctccgggatggaaacactcaactttatggagccgcagagcgccgccgacctgatccgcgatgaacacccgcagatcatcgctaccatcctggtacacctcaagcgcggccaggcagcggatattctggcgcagttcgatgagcgcctgcgcaacgacgtgatgctgcgtatcgccaccttcggcggcgtgcaaccggcggcgctggcggagttgaccgaagtactcaacaacctgctcgacggccagaacctcaagcgcagcaaaatgggcggagtgcgtaccgccgccgagataatcaacctgatgaaaacccagcaggaagaagcggttatcgacgcgatgcgcgaatacgatggcgagctggcgcagaagattatcgacgagatgttcctgttcgaaaacctggtggaggtcgacgatcgcagtatccagcgcctgctgcaggacgtggacagcgaatcgctgctgattgccctgaagggcgccgagcagccgctgcgcgagaagttcctcaaaaacatgtcgcagcgcgcggccgatattctgcgcgacgatctcgccaaccgtgggccggtgcgcatgtcgcaggtggaaaacgaacagaaagcgattctgctgatagtcagacggctggcggagagcggcgaaatgatcattggcggcggcgaggatacctatgtctgatcgcattaattccatgccctggcagccctggtcgctcaacgacctcggcgatgcagggccagctttcgaaccgccgctaccgacgctggataacgaagccttgcagcctgacgctcaggcggaactgcagcagcagcttgccgccctgcgcctgcaggccgagcagcaaggtcagcaatccggttatgccgatggccagcaaaaaggctatgaagccggatttcagcagggacttgaggagggccgccagcaggggttgctggaagcacagcagcagcaacagccgctgaccgaccactggcagcagttggtgagcgagtttcagcacacccttgatgcgctcgattcggtcatcgcctcacgcctgatgcagctggcgctaaccgccgcgaaacaggtgcttggccagccgccggtctgcgacggcactgccctgctgacgcaaattcaacagttgatccagcaagaaccgatgttcaacggcaagccgcagctgcgcgtacacccgcaagattatgagcgcgttgaacagcagctaggcaccaccctcagcctgcacggctggcggctgctggcggacggcgatctgcatcccggcggctgtaaggtcagcgccgaggagggcgatcttgacgccagtctcgccacccgctggcacgaattgtgtcgcctcgccgcgccgggagatctgtgatgaccgcccgtctcggccgctggctgaattcgcttgaagcactggagcagcgtatcgcccgtacgccgaccgtacgacgctatggccgtctgacccgcgccaccggtctggtgctggaggccaccggcctgcagctgccgctcggcgcaacctgccttatcgagcgtgacggcggcggcggcgtgcaggaagtggaaagcgaagtggtcggctttaacgatcagcggctgtatctgatgccgctggaagaggtcgaagggattgtgccaggggcgcgggtttacgcccgcagcgcagcggacggccagcacgccggtaaacaactgccgttgggcccggcgctgctgggacgcgtgctcgacggcggcgccaggccgcttgacggcctgcccgcgccggaaaccggctatcgcgcgccgctaattaccgcgccgtttaacccactgcagcgtacccctatcgagcaggtgctggacgtcggcgtgcgtaccattaacggcctgctgaccgttgggcgtggccaacgtatgggactgttcgccggctccggcgtcggtaaaagcgtgctgctgggcatgatggcgcgctacacccaggccgacgttatcgtcgtcggcctgatcggcgaacgcggccgggaagtcaaagactttatcgagaatattctcggcgccgaaggccgcgcgcgttcagtggtgatcgccgccccggcggacgtatcgccgctgctgcgcatgcagggcgccgcttacgccacccgcatcgccgaagattttcgcgatcgcggccagcacgtgctgctgatcatggattcgctcacccgctatgcgatggcgcagcgtgaaatcgcgctggcgatcggcgaaccgccggctaccaaaggctatccgccatcggtattcgccaaactgccggcgctggttgaacgcgcgggcaacggtatcagcggcggtggttcgatcaccgccttctataccgtacttaccgaaggggacgatcaacaggatccgatcgccgattcggcgcgcgcgatcctcgatggccacgtagtgctgtcccgacggctggcggaggccggtcactacccagccatcgatattgaagcctcgatcagccgcgcgatgacgtcgcttatcgatgacgaacattatcgccgggtacgcacctttaaacagatgctggccagcttccagcgtaaccgcgatttgataagcgtcggcgcctatgccgccggtagcgacccgctgctggataaagccattaccctgtatccgcaaatggagacctatctgcagcagggaattttcgagcgctgcggttatgacgaagcctgtctgcagctacagcagttgattgtttaacgccatcggagacgccacgcgatgaaagcacagtcccctttgattaccctgcgcaatctggcccaggaggccgtcgaacaggcggcgcagcgcctgggccaggcgcgccaggcgcaacaggccgccgagcaacagctgacgatgctgcttaactatcaggacgagtaccggcagaagctcaacagcaccctttccggcggcatggaaagctcgcgctggcagaactaccagcagtttatcgccaccctcgaacaggccatcgaacaacagcgccagcagctgctgcagtgggggcaaaaggtggatcacgccgtgaagcagtggcaggaccatcagcagcggctgaacgcctacgataccctgcacacccgcgcgcaaaacgccgagctgcagttggaaaacaaacgtaatcaaaaattgatggatgagttcgcgcaacgcagtacacaaaggaataccgcttcatgaatctcaatgctttgcccgcccttagcctacccggcgacgccagcgccctggcggatctggcgctcgatgacgctcagctgtcatctgcctttgcgcaactgcttggcgcgcgcttcacgcccgcgcaaagcggcacgctgccgccggcggcgctgagcgccgacgatgaaagcgccccgccgctaagccgtaaccagcttaaccagctgctggccgcgcttggcgaacgcggcgcgctgctggtcaatgcgctaccggcatcggcggaaaacgccgtcgacgcaacagcgaaaaaagaggatacgcgcccggatacgccgccgctcagcgaggcgaaaactttagatccggcgacgctgcaggcgctgtacgccatgctgccggcggcaatcgtcgccccgcccccgcagaccgcactaccgcaggctcaaccagctgcgaccagcggcgataaaaccgcgctccacatcggcaacgcagctattcagcatgtcgcgaacctgccggaaggcgaagcggcggcgaagccgcagccgggcacggatccccttagcgggcaaaatctgccctcccctgtcgcgcaggccgcggctacgccgcagcacgatatggccgaacgtccggcggagaatactccggcgcaacctgccgccgtcgctttcgccgccgccagccccagccaaagcgccacgcccaccaacgcgctggtaaccgcgccgccgacgccgcagcttaatgcccagctcggcagcccggaatggcagcaggcgctgagccagcaggtgctgatgttccaccgcaacggccagcagagcgccgaactgcgcctgcatccgcaggagctggggcgctgcagatcaccctgcagctcgacgataaacaggcgcagctgcacatcgcttccgcacacggtcaggtacgcgcggcggtcgaggcggctatgccgcagctacgtcacgcgctggcggagagcggaatcaacctcggtcagagcagcgttggcggcgaggcgacgccgcagtggcagcagcaaaacagtcacggtgaaggccgcgccagctacgctgaacgccatggcggcggcagcgatgccgcgccgattgagccagtcagcgccccggcagccctgctgcgaatggccaaccagctcaacggcgtcgatattttcgcctgagggcgctaaacggccaatctggccccatttgcccgtttattccggctattgcctcgcgcattagccgcgataatacctttatatgtcatacgtgcggcgccgccgctcgtgatgcccgtcagcaacgcggcgggcggaacaacaggaattcgatttggctatgtctcaaaactcccttccggcaaccgcgcccaaacgccccttactgatcattctgctgacgatcgtcgccgtggccgcctgcgcagccgcaggctacagctggtggctgctgcaacagcgcgacggcggcgcgcaaaccgccatcgaaaaggaaaaaccgcccgcgccgccggtatttatgccgctggataccttcaccgtcaatctggtgaccccggacaacgatccggaccgcgtactgtatatcggcctgacgctgcgcctgccggatgaggcaacccgccgtcagcttaatgattttctgccggaggtgcgcagccgcctgctgatgctgctttcgcgtcaggaggccggtcacttggcgaatgagcagggcaagcagcagctggtcgcgcagatcaaagagacgctgagcgcgccgctggttaagggacaaccgaagcaggtggtcagcgatgtgctgttcaccgccttcatactgcggtaatcaccatgggcgatagcattctttcacaggcagagatcgacgccttgctcaacggcgacaacacgggcgacgagcccgagaaggttgtcggcggtaaagagagcgaggttaagccttacgatccgaatacccagcgccgcgtggtgcgtgaacgcctgcaggcgctggaaattatcaacgagcgttttgcccgacagttccgcatgggattgttcaacctgttgcgccgcagcccggacatcaccgtcgggccgattaaaattcagccgtaccacgagtttgcccgcaacctgccggtgccgaccaaccttaatctggtacacctgaacccgctgcgcggcacggcgctgtttgtcttcgcgccgagcctggtatttatcgccgtcgataacctgttcggcggcgacgggcgtttcccgaccaaggtcgaaggccgcgaattcacgcccaccgaacagcgggtcatcaaacgcatgctgcgcctggcgctggacgcctacggcgacgcgtggagcgcaatctataagattgacgtcgaatacgtgcgtgcggaaatgcaggtcaaattcaccaacatcaccacctcgccgaacgatatcgtggtgaccacgccgttccaggtggagattggcgccctaagcggtgaattcaatatctgtattccgttcgccatgattgaaccgctgcgtgaactgctgaccaatccgccgctggagaattcccgccaggaagatagccagtggcgcgaaacgttggtcaagcaggtgcagcactctgagctggagctgattgccaacttcgtcgatatcccgatgcgcttatcgaaaatacttaagctgcagcctggcgacgttttaccgatagataaaccggatcgcattatcgcccatgtcgacggcgtgccggtgctgaccagccaatatggcaccttaaacgggcagtacgcccttcgtgttgaacacttgattaaccctattttgaatgctctgagtgaggaacagcccaatgagtgatcctaagcaaccgtctggcgcaggaaaggaatccgtagacgatctgtgggctgatgcgcttaatgaacagcagtcgtctgaaaaatccagcgccaccaccgatggggtgttcaaatcactggaggcccaggatgcgctcggcagcctgcaggatatcgatctgatcctcgatattccggtgaagctgaccgttgaactggggcgcaccaaaatgacgattaaagagctgctgcgcctgtcgcaaggatcggttgtcgcgctggatggcctggcgggcgaaccgctggatatcctgatcaacggctatctgatagcccagggcgaagtggtggtggtggccgataaattcggcgtgcgcattaccgatatcattaccccctccgaacgtatgcgtcggttgagccgctaatgaccgcccccgttaccgtgcaggccagccaaccgattaccgaaccggcaatatccggcggctcggcgctcatgcaggtaagcagcgcgctcggcgcgattctgctcctgatcctgctggccggttggttgttccgccgtctcggctttgcgccgcaggcgcgcaacggccggttgcttaacctgcgcgccagctgccaggttggccagcgcgagcgcgtggtggtggtagaagtggataatactctgctggtgctgggcgtcaccgcccagcagatcaccccgcttcatcagttcccggcgccgccgcgtgatgaagataacacggcgatcacgcctgcgaacgacttccgccagctgatgcaaaacgtcctcaaacgcccggaaaaatagccatgttccctactctgttcgcttgccttcgccgtcgggcgccgtggctcgccgccgcgttactgctgctgagccctgccgccttcgcacagcttccggggcttatcagtcagccgctggccaacggcggccagagctggtcgctgccggtgcagacgctggtgctgttgacctcgctgaccttcctgccggcgatgctgctgatgatgaccagttttacccgcattatcatcgtactgggtctgctgcgtaacgcgctgggcacgccttccgcgccgccgaaccaggtgatgcttgggctggcgctgttcctgaccttctttatcatgtcgccggtgttcgacaaggtctatcaggaggcgtacctgcccttcagccaggacaagatcggccttgatacggcgctggataaaggcgcgcagccgctgcgcgaatttatgctgcgccagacgcgcgaaagcgatctggcgctgtacgctcgtttggccaaccagccgccgctggccgggccggaggcggtaccgatgcgtattctgctgcccgcctacgtcaccagcgaactgaaaaccgccttccagattggttttacggtgtttattccgttcctgattatcgatttagtggtcgccagcgtgctgatggcgctggggatgatgatggtgccgccggcgacgatctcgctgccgtttaagttaatgctttttgtgctggtggatggctggcagctgctgctgggctcgctggcgcagagcttctattcctgaaccgccggagaacaatcatgacgccagaatccgtgatggccattggcaccgaagcgatgaaggtcgccctggcgctggccgccccgctgctgctggcagcgctaatcagcgggctggtggtcagcctgctgcaggccgccacccagattaacgagatgaccctatcgttcatccccaaaattctcgcggtagtggcgacgattattatcgccgggccgtggatgctgaacctgctgctggactatatgcgcacgttattcagcaacctgcctaatattattggctagccgtgatcccctttgacagcgcccagcttagcgaatggctcagccagtatttctggccgctgctgcgtattctggccctcatcagcaccgcgccggtgctgagtgaaaagcagataagcaaaaaggtgaaaatcggcctcggcggcctgattgcgatactgatcgccccaacgctgcccgccaacacgatccccattatctctgctgccggtttatggctggcgattcagcagatcctgatcggcgcggcgctggggctaacgatgctgctagctttcgccgcggtacgcctcgccggcgaagtcatcggcatgcagatggggctatcgttcgccaccttcttcgaccccagcggcggccccaatatgccggtgctggcgcggctgctgaacctgctggcaatgctgctgtttttaagctttgacggccacctgtggctgatctcgctgctggccgacagtttccataccctgccgatccagagccagccgctgaacggcaacggtttcctggcgctcgcccaactgggttcgttaatctttatcaacggcatgatgctggcgttaccgctgatttgtctgttgctcacgctcaatatcgccctgggtctgctcaaccgtatgacgccgcagctatcggtattcgtgatcggtttcccggtgaccatgacctttggcattatgaccctcggcatgatgatgccgatgctggccccttctgcgaacacctgtttggcgagatgttcgatcgcctggcggccgttatcggcggtatgacgttttaaccttgccgttatttccctctttttcgccggacaaaatggcaataaaaaccgtttactgggataaaagcctggaaaaacgtttttattgctactaaggtccgaatgttcatagcggcttgaattaaaaaatagccaccctacaataaagcctgaatttaattgttagtgaattttattttttagaaaaattgaaacctcgggaaacgcagaatattttcatgcatgggtttagtgtatctttaataaaataaggagcgacatcatgattaaggcgaaaggtaaccgtatagcgcggcgaatattaggcctgccccactgggaaagtaaccgatttaaaatcgtgctggccgacactgccgctggcggaaaatggaaagtggtgaagaaaaagaaataatcctgactggcaattgatctatccgcaacataattccaaattgcacagtgctgtagccccggtaagcgctagcgccaccggggattttgagaccacccacacaggcagtttcagttcgcaatggtacgttccgtaggtcgggtaaggcgttagccgctacccgacaaaaatattcctgccggtttccattctaaatttgaccatcaaagatatagatattgcctgattcggaaaaataaaagagttaataatatagtcaaggaaaaacaacgcctctttactctataattgctttctttaaatgaatacgctcaaacagcatgacgcagcgcccgtattccctttccagtctgacgacgcagcagcgcaagcagcgttgacacctccgaataacccacgtcagcggtaatcgtctcaatatctttcccctcggcaagcagctgctttactcgttcgatccgtaattgctgaaaaaaagccaacggtgattttcccagcgcggcttccattctgcgctgtaaggtgcgtggatgcacgttaagcgcaccggcagccgcctgcagggaaaatccctgtgccagatgcgcccgcgaccagtgctcaaagcggtttatcaagtcatcggcatgctgaggataacctgccggcgctgtcgtcagcaaatccgcaagcggcgggctgctctggcgaatcagccacagcgccaactccacatggcccatcatagcgccgggaagcattggcggggccgcattgagccatgacgttgtggcggcctgctcattgagcaaacggctatcagccaggatgaaagtatttaaacacgcggcggcaattttaacgccgtgcttcgccatgttttgcaaaaaccgcttagcgtcagcaatatcgtgccagccatccggtggcgattgtcgtgcgtgaacgttgatcgccggaaccacaatccagtcgggataatccaaacccgatgcctgatgagcaggaatactcagcccatgggctgatttaacctgcccggtcattgcaatcatctgcacatcaaagggagaaatattcatgctctggcgtcgcgccatatcattggccgcggcgaacgtatccagcaacgtcgctaagccggtgtcgaaaacgccatccagagtcagaatatttatcttcatgtcgttaatggtattgaaattgtcattttttcatatggttctattttaaccttagccatagactttcctctattgttattaatcgccagagtcaattgccatgaaaaataaccctgaactgattatccttgcgttaatttgtctgctaacggttatgatgtggatcccctatattattgccaaagccacacgtgctaatgtcgcgcccgcagcgggtaatggccattcgccatcaaccgggctggcgccctgggcgcagcgtgcacaaaaggcgcacgccaacgcggtagaaaacctcgttatttttgccccactggttgtggtcgccgcgttgctaaacgtcaataacgccataacgttaattgcggctacaatttatttgctcgcgcgcatcgtccattatattgcgtataccaccgggatccccgttatccggactctcgcctttcagaccggttttgtcgcgacggttactattgcgatagttattttaagttccgttttttgaggttaaaaactcccggcattctctgccaacgccaggctttgtagcgccgtcttcagccatttggttgcccctcgctgcccgccgcgtttatgggaatatatcttcacggtgaacgggcttatggcgaacggcaaaggaaaaatcgcgatcggggcagcatgaaggaacttctctgcggcataacgaggaatcgccattaacagatcgctttgcgccacaataaacggcgcgctgagcattgagggggttttgagcgctatctgccgggtatagcctaattcctgcaaacgtaaatccaacaccccctgcttttcgttccacggcgtgaccaccagatgccgcgcggcgagataatccgccagcgtcaacgccgtgcgacgggtatggctgataaccacatactcatcctcaaaccagtcaatttcctccagttcatgatgacggaaatcttcagcggtgctgaagcccagcgccagatccacctccccgccagtaactccgtcagcgccgggctatgtggcaaataacggagctcaaaacgcaggcccggcgcttcatgctgcagcttttgcatcagcacagggaaaatacataacgcggtgaaatcggtaatggctatctggatccgctctgtgctgtcggcggcactaaactctggctgtcgcgtgagttcctgattaagcaatttcaatactgaagcgatggagggcgcgagttgcgtggcatagacgctcgggcacatccgatgcccttcgcgaaaaaacaacggatcgttcagtgccacgcgcagccgcgacagcgcgtggctcaacgcggatgtactcatcgccagctcatcggcggcgagacggacggaactgtggcgatagatggcatcaaaaacaagcaacagattgagatcgaggcgtctgagcgccggatgcataatattcatcattgggtgatttcattgcacttaattcttctgacaataccccctatgcttagcgtcatcaatatcattaacgtgtgaatacgacaggaaaaataatgagtattacgattcgacaggcccgtccggacgatgcttctgccatctacaacatgatttatgagctggcggtgtatgaaaaagccccgcaggaagtggttactacccccgacgagatccgcgaaaccttgtttggcgacgacagtaagaccgaagcgctgatctgcgaaattgacggtaaaacggcgggctatgccgtgttcttcaccagctattcaacctggctcggacgcaacggtatttatatggaagatttgtatatctcaccggattatcgcggccagggcgcgggtcgagcgctgctaaaaaccattgcccggtatgcggttgcgcgccgctgcggacgccttgagtggagtgtgctggactggaaccagccggccattgatttttacctcagtattggcgccgcggcgcaaagcgaatgggttcgctatcgcctcgatggcgaagcgctggttaattttgcggagcaataacattgctcacagcgccacttagcttgctctttgcaaaaagcacagcagccccgaaagagcggagctgctgaaaggcaagttagtacgctgtttcagtctgcgatgaatcctgcactacctgtagaatattggccgcggcggcggtacccattttgacgtaagaggcgtcgcttacgccgccaacgtgcggagacagaatgacattttcgacccgctcccagatgtgcggcgtagtgagtggttcgctgttaaagctatcgagcgccgcccagcgcaatgccccccttttaatgccgctgccagcgctgcatcgtcgattaatccgccccgcgcggtattaaccaggatggcgccgggtttacactgtgccagcgtaacggcatttatcattccccgattttgcggcgttaagggacaatgaagggagacaacatcagcctgcgcaagaaggtcttcgagtacatcaacacgttcgcatccgggaggaaccgtggcggcataaggatcgtaagccagcaccttcataccgaaggcgccggcaattttcgccacccgactgccaatcgcccccagaccaatcagccccagcgttttgccttccagttcgagcgatttatgcgtcgatttatcccagtacccttcgcgcaggcggcggtcaagcggaatgattgacttggcacaggccagaattaatgcccaggcgtgttctgaaaccgccgcggcgttagcgcctgtcgccgcgcgaaccatgatgccgcgcgccgccgccgcttcgacgtcaatgacatcaatgccgctgccatgcttggaaatgaccttcaacgccggagcggcatccatcacagatgccgtaatcttgccatatcgcactaatatggcgaccggattatgctgctgacataattctgtcagttggttttctgttggttggcggccagcaaacacgagttcataatcttccagcatgccgagcgccgcttcggccaaatcgctgccggttaccagtacgacttttttagcgctcatggcaatgcctccccttcgctcagcatacccgcctgacgcaacgcgttctccagccagtgtgggcgaagatcgccatcgtggatagccgacagacgtttgacttccccttccagtttacctttcgccagctcaatgatggtgcctacttcatcgcggggataaccaccacgccgtcaatatcccctaccaccaggtcacccgcctgcaccgcggcgcccgcgaccgaaatagcatgattgacccggcctggaatgaacttggtgggaccacacggattaagaccggctgcgaaaacaggaaagctttgtttacttaaggtttcagcatcgcgaactgcgccgtcaatgatgatacctgcgatgccgctggcctgcgcctgcgtggccatgatctcacccagtaaagcgcaggagagatcgcccttgccgtctatcactaacacatcgccaggtttggcgacggccatcgccgcgtgaatagccagattatctcccgggcggacctctacggtaatcgccgggccggccacagccatgtgtggcgccagtggcttgatacggccatgtaatgtgccgcggcgtccggctacgtcggcgataatcgccgcctgatattcagcggcctgacggacctcctccgcgctaacgcgctcaatatccacgtttattaatttctgttgtgatgcaggcatggttagtctccatttgttttactatgtacaacacatatgtactatataaaacaactatacgagcattgcttctcttttcgccagcgctgagagcttgtttgtgatgtaaacacgatgttaatcacaaaattcaggtacaattttgttcggccaaaaggagaaaatgatggggaatgaaggcgtaattgccgttgaaaaggcgctcgctttactggattgcttccggcccggtaatgacagcctgacgttaactgagctggcccagctttcgggataccacaaaaccaccgtttatcgcttaatgaattcgcttgagcgtatgaactacattatccgacatgatgatggcacctatacgctcggccaccgtctgctctatctcggcaagctttatgagcaatcatttcagcttgcgagaattgtacagccggaattgcaggcgctgtctcaggcctccagtgaaagcgcgagctggtatgtgatagagggcggccaacgcctgtgtctgttccgcgccgaagcttcagagggattacgccatagcaacctgcccggcagtcaatttccactggatggctccgctatcagcaaagttttacgtcattggggactgggtgaggcgctttcggaagacgaagaaacgctgccgttctatacctctggcgcgcgcgatccgcacaccgcggccttcgcgatgccggtttttggcgtccacgataaccccatcgcggcactggcgctgacaggaccgtcatcgcgtctgactgcggaccgcaaagagagcggcctcagccagctaatgcgcgagacggccaaccgcctgtcgatcaagttaggagccagtaaatccttctgcgaaacgttttacgatataaaagaataacgtatgttgaaaaggcgggaaaaatcccgcctttgcttattaatgggtgaccggtttttcctgaccggcaggctgcgagtaacggcgtcccatgatcagcaccgcgataccgcctgccaggcacaagccagccagtggtagcatcgccagcgtatggcttcctgtctgttcgctaatcacaccataggcattcaccatcaccactccgccaatcagattagctatcgcgccgattgccgccagccccgcggcggctgaggtgctgctcatccagcctgaggccagcgcccagaatggccccttcgccgaataagcgccaattaatatggtactgagaataacaatggtaatcggcagcgagagattgatgaacgccgcgaacacgccagccgcaatcataaagagggtgagagccgtgtgccagcgacgttcattagtgcgatccgaactccgaccccagacaatcatcagcaccgaggccaggccataggggatagcattaagcagcccggtagtcaggttatcaagatggaaagacttcagtagctgtggcgaccagacgctaagcgtggtgccagcagacgacgcgccggcataaatcagcgccatcagccagatttggcggtgcttcaacagctgccatgtgctgatgtggccgatctgtttctgctgttgacgctctgcctgaagggtgttttccagccacgctttctgccgctcgttcaaccagccagcctgatgtgggcggtcccgcaggataaaaaatgcggctatccccagcagcaccgcaggcagcccctcaataatgaataacagatgccagccgcgcagcccaaaccagccatccagcgtcaggatcaaacctgaaagcggtgagccaataaagttagccagcggaatggccaccataaaagaggcaataatacgcgcacggtaacgcgaagggatccaccaggtaagatagagcaccacgcccgggaaaaaccccgcttccgccgctcccagcagaaaacgcacgatataaagggaggttgtattttgcaccagcgccatacacatcgataccactccccaactgatcataatccgcgggagccacaatcttgccccgaccttctgcatcgccaggttgctgggtacctcaaatataaagtaggcgacaaaatataagctgctggcgaagccaaaagccgccttgctcaggcccagatcctcattcatctgtagcgcagccatacctatattgccccggtcaataatcgagaccagatagcttacgaccagaaaaggcaggatgcgccagataacccgccgcatggtctctttttccagcgcgtcgttgtcgatagcgctattcggtaattgatcggtcattgtttcctcgcagggtttcattatgtttatcaggaaaacgatgtagagatatcatgccttacttcagcttgacgcctctggtttctggcgccagccacaccaccaccattgccgccaggaaggcgaccacggtagtcgccagtcccgcggtgaaaccgccggcgctggcgacggcgccaatcagtagcggcgcaatatatccgcccagccggcctccgttgtaggcgagccccatcaggaagccacgcgatgacgtgtctccgatgatttctgcaaggaatggtccagatccggcaaaaatcccgttaacaccaaaaccagccatgaaaatcgccagcatcagaatgaagggttgagtggtcacaaggtaaagcgcgacggcaatggcgcccgttaacagataaatcaggaacatcggacggcgtccccatttatccgccagtactgaaaagaccagaaaacctgcgatcgccccgacctgcagcgcgagcacaaatttcaggctatgtagaaaatccagatgttttacttctcgtagataggtgggtgtccaggtaaatacccccagaatagatactgaataaagaagataaagacgaaagccagcagcaggcctttcagattgtgtttgcccagtttcgaggcaggttgagtgcgcttagctttcccctgctgtcgtgcaagccaaacctgtgattccggcgtgaaccaggccaccacgctcataatgaataccggcagcgcgccgatcataaacagatagcgccatgcgccctgctccaggccgccgttaaccgagctcacgattgccgtcaggctgatagccagaatagcgccaacgggtaagcccatttgcatcaaagcgccgccgcgcgcgcgccgctctggccgccaggtttcagcaatcagcgccgcacctgacgtccacattccgcccatacccagcgcaccgcaaaaacgcaaaagcgcgaaatgttgttgatcgtgcgtaaaggctaacagtccggaaaagagtgaatagatggcgatacaggtcatggccgtttttacccgaccaattttatcggcgataaaaccaaacaggatcccgccgatgatctgtccaccggccgtgacgctgataaacagtccaagttcgcttttattcacgccaaacaccactcctaataccggcaataataatgagagtagaaatgagtcgtagctttcaaatgcccagccaaggccgcccagcgccagcgttcgtttctcagccacgtgctgaggcaaagcgtcaggcgtcgctttagtcgcagtaaactgcttgagctcgcttttactggtcattgatattctccacagaggttatccggtagcaggttgcggcagtgcgccagaacaattgcgcctgttcatcaggggaagcctgttgcgccaggcgtttgcaggcattccagaagacgccgtagctgaacatgcctttatcgaccggaaaattgctggcgaacatgcagcgttccgcaccgaaaagagcaatgatggtctcaaaccacggttgccatgcctgtgccagcatttgcgaatccggcggcgtttctgcggctgcgaagggaaatcccctgaccgtcataccaaatccgctaatttttacgcatacgttcggcagttccgccagatgtcgcatactgcttcgccactgctgaaacatggcaggatctctttctgaataaggccctacgccgacaggcccgccgcagtgatcgagcacaatctgtagcgttggtatttgccgcgccagctcggcaatttcatccagttgcgtgtggtaaacccacacatcaagcgacaatccattttgcgcgaggcaagcagcgccccggcggaacggatcgctcagcgccagtcctgccggtggtgtaaccgggctggacgtgacccgcggatccggatgccaggccagtggattacgcattccgcgcaaccgcccgcctgataaagccagcgcgctctcgatggcaggctgcatcgcatcgcccgccagcaagctcaggccgccgatgatggcttcacatccaagagcgtttgcataatgtccgctggcgaacatcgcggctatcccgctggcaaactcaatttcaccaagcggtttcaacgtttccggcccgtggcgacgcagcatagagcggcattgcacgtagaccgaggagaaaacgcgatgccctgaggtctggatatcgtcgctgaactcatgggtgagatagcgtccggtttgccgatcccagagatgatgatgcgcatcaataatgggcagctcgggttgtagtggcggctcacgatgtaacgcaagccactcgtttctgaccgcaagatgcggtgcggtaacgatctccatgaacacctcgcaattgttgtaccatgtacaaccgtgttttattttacaaaactactataacgaggctggcgtgtttttatccagttaacgattggtttaaatgatgtaaataagaggtgaatcacagatgtttaaagtcgctaaagaaggagaacgttgagaaaaaataaaaacaaatttaatttcaatgagttataatgttatgccactcatcgcagccaggtatctggcaaaccttacgtctgccagacccattcactctgtccatttacggatgactattcgatgagtaaagcgttatatcgccctggggcttttcagcttccagaccagcgccataccgcagatcatcgccaccgccgccagtaacggcagtgaagaaagaccaagctttgccgataccaggccgccgacaagcgcgccagtaccgatggcggcattgaaaatggcgacgtagatcgcggatgccggctgcgtcgcctcccctgcgctacgcaacagccaggtttgcaaaccaacgaacacgatagccatgcccgcgccccatacgccgagcaataccgcgacgaaccaaacaggaagtgctgacccgccctgatactcagcatccccagcgcgcctgcgctgagcagcagtgatgtcataatcagcactcggatatgtcgatcgatgagtttgccggcgatgagatttcccagcagcccggtaagtcctgacatcagtaacagcgcggaaatcgccgatgtcggtataccacgggtttgcgttagcaacggctcaagataggtgaaggcagcaaaatgcgcggaaataatgcaagctgtagcgccgaacaatgaaagcagtagcggatttttaactatcccaacgtaaactttcagcctcaacggctgcggagccgccagcgtgggaagcgtccagagcaaagccacggcggcggctaatgagagtagtgaaatcgcgctgaatgcctgtcgccagccgaccatgtcggcaataaagctcgatagcggcacgcccagcacgctggccgccgaaacaccggcgaaaatcaccgaggtggccagccccagtttatcaaccggtaccagttgtaccgccacggtgcctattagcgcccagaatgcgccatgcgccagcgcccctgtcatccgcgccgtcataaacgtctgcatggtgtgcgactgcgtcgccgccagacaagaaaatgcgaggattaacatcaatacaatcaatagcgccttccgtgaaatccgggcggggatcgcgccggccagtaaagcggccagcgcggccacccagccataagcggtgacggcaagacccgctcccgcctgcgactgatgcaaatcgttcgccagcgcgctgagcataccgaccggcgccagttcgctggtcacaatcgaaaatgcgctgactcccagcgcagctacggcgagccatgcgcgcactggcgtcggattggcctgtaaaacgaggtcgttcatgtcttctgtatccctgagtaaatggctaaaaaagagttggcttgcctgatacggttgaagttccgcgtcgttgcttattgccttctcttgaggtgaagtgcagtatcattccaggagaagtgataaaacagacatgaaaacggagagccgttttccaaaaatggaaaataatgaaagcagattttaactgggatgatacgcggatttttctggctgtggcccgctcaggtacgctaagcggcgcggcagaaactatggatatgggcatcgcaaccctgtcacgaagactcgaccggctggaaaaatcattggccgtcccccttttcagccggcatcaaagcggctaccggctaacggatgatggcgaggcgctgctggcgcgagcagaggcgcttgagcatgcagggctcgcttttggcgagacggcgaggctgcaggggaacgtggccggactggtccggctggctacctcggacaacctggcggcgcattttattctgccttcactcaacggcttgatggaaaaatatcccgacctgcgggtcgaggtgctcagcggcgtgcaatccgtcaacctacatcgacgggatgccgatttagccattcgaatggttaaaccggaaagcggcaacctgacgctgaagcgtctcgggaaggtggggtttggtctgtacagcgccgataccggacaagcaggctctactgacgtcgcgttcaatcatgctcagtacattggctggccagaatcacaccagcatttgcccgccgcgcgctggataactcgaacgcttcgcggcaggccgtgccgggtggaagccaacacgctgctggcgcagctgtcggcggtctcagccggcctggggttgggcgtgttgccacactttatggcgcggaaaaatggcctgcagtgcgtgaatgcggatatcggcgtcgaccaaaccctatggctggtgatgcattccgatttagcccattcgcggcgcgtcagagtggtggccgatcatttaattgccctgtttgatgagattaaagatcaactgacatcgccataactctgtaagcgctcgccgccagatacagcccgattccgtaggccaggtgcgccagtaggctcagcgagcgcgccagccacggtcgggagtccgtgaggccgcgacgccaaaaccaaatgcgggttgcagtatcaagaacggcgccaataaggttacgacccctgacagcagcgctgtcgccagagtgggggcataaaaccaatcggcgccgctcaacgtaagcggcaccgccgcaaaagcgataccgatcagataatggcataaccagccgataaaacgctctccatgtagcgaagggttacgcagatggttttatgccgcactttcccccgccaaagccataacgcccagcgaccgaccagcgcatagttcagcggcgcaatcttgagcatatgcttctgaaatagcgaccataaatccatgactaacgtcgcgccgatccccgttactaaaatttgcacaacaaccatgatattcaatttcttcttccttttatgcgtcaatgctactctgtcgacgagtgtgcaacttaaagcgaggtttaagtcaatcatgaaagaactggatatccgcgaggtcgcggcgctgtccggcattacgccttcagcgctgcggttttatgaaaagaaaggtttgatcaagccgattggtcgtcatggtctgcgaaggcagtaccatgaaaatgtgctgaataagctggaactgatcgtgctgggacaggccgccggcttttcgctttctgaaatagccgggatatttgacgctgacggcaagatagccattgataaccatcggcttgagcagcgcgcgaaggaaattgataacaccattcgccgattacagctgttaagccaggggctaaaacacgctgcccgctgtactgcgccggaacatatgcaatgccctgaatttaaaaaaattgtggcgaaaggaattcggttcttaaaatgaccgtccctgagcgatgccgctttttactcagattacggggtaattatggcgctcctaacaagacgtgtagtaccaggttacagccaacgaagcagaccccactgagatataagcaacctcagtccatcttatgaaaattggagtcctgttttcatctcaaaccaaccaaaaggtaatggcgatcacgacaactgcgaatatcgctgtcgatccccaggcaaaagaaggccagaatgttactgcgagcatcccgaatccaagaataagtagtaccgggatcagggtgctggcaaagtacttcaattgagtagacaaccatcgttttaaaaaattattcatctgataacccgcataattgcgtcagcaatgtcattgtctgatgttggtgggagaaagtggtgattgtttaaaccgataacgggttcaataatgaaataaagcatttccagtttttctgcatacaacgcgttgtaataaccttgatgtcctaatcggagcctatttgccgcttcagcggcctcttgtacgtatccgtaataactgactatggtaaccgcagcaacgcttatttttgccagttttgtattgaccccaatcctaagcccaaatttgtagctcactgacgccacgatggtatacgctagcgcttggttcgtcattgccctgaagcaattgtcgctcccttgccaatcagaatcttttggatatggccaatgcgctcagatgtcagtccttgcaatagctgtttaacatagatttcaaacattctggtgactacacttcatgttttaccaattgcgtgagtccttccagaaaacgaatgtcttcagttttctgagctgcacacacgtcctgatagttatccgtaaaacatgaagtgtagtacgcgaggcgtcttgccccgagccgcatacggcgcgcttggtcaagtacagaatctttcacaccgcctaaagctttctcaagacgcacggctaataaattatcggcctgcattttggtgatctggtctgagttgctaaacatgtaggtaatctagttatgtaaagtagtgagtataattatcctccacagggttcattgggaaaaggaaaaacaattgacgagagatgacttttcaaccaaatagtcgcttgggcgagttagttcccgaggctcccccacttccacctgataaaaaagggcacctcaccccgcgtacacagagagaacgggatgacgtgccaaggtgctaaatgaaaaagtggttattcgtgattagcgattcatctgaaacagcgacattccctgcatatcgctgaaggttttataagatgcctgcagcgccgcctgctgcataaaataagaagagatagattccgcaaggtcagcatcggtcagggcgctcatctgcagctggttggtcatatcacgctctttaccgatgctatcgagctgatccatctcttgtagctggttgcccagctcggcgcgcacgctcaataccttgttgtaggagttatcgaggccgcggttggccttcgccagcgcatcgttcacctgctgtttggtggcgtcatcggccccctgcagcggcgttttcaacgcttccagcgcaatatcgatactggcgaacacatcggcgaccggcgcgctgccgtccggctccggcttcggattgctggtcagcgccataaataccgaattaccggtatggccgatggtcatcgtacggttggcgtcgaccttctgttcaacggttttattgccgccctgatagctaatcttgccgttagtatcgacaaacggcggtttgtcattctcatagccgccaaacaggtagcgtccgttgccgtcggtactgttggcctggttgagcagttgatccttcagcccctgtagctgggtcgccagcgaatcgcggtcgttatcgctctcggtgccgccggcattaacgatcagcgccttgatatcagaaatcgtcgaggtggctccggaaagcacggtctcttccatcgatacgctctggcgggcgaaagtgcgcgccagggtgtactgattgttctcggcctgcgattgcgacagcatcaccgcccgcgatgccgccagcggatcgtcggagggattaatcaccttcttgccggttgaaagctgctcggcggccttcataaacagcgactgattgccggtgatgccggtcatgttctgttggtacatcatgctggtgctcatgcgcatgctgtcagttcctcaatacaatcaacgaatattcagcagcgcgtcgaacagcgagctggcggtctggatcacctgggcgttcgccatgtagtactgctggaaacgcaggagctcgccatactcttcgtcgaggtttaccccggagagcgactgctgttgacgggccagttgggtgacgatactggactgcgattcgctgctcaccttcgcggcggcggtctggttgccaacgccgctgacgatcccggcgtaggcgccgctgagcgtcgctttgccatccaccaggtttttggtctgcagatcgagcagttttttagcgttatcgttatcgccgcggccgctgtcatctttaccggcggcggcgattttcgctgaatcggtaatcgccactttcaggttgcccgccacgtcgctgaccggcttcaccgtaaagctatctttctgctgcgggttgccatcaatactgacttcgagaccatcaaagctcagcgtcgggttaccgtctgcatctttaccggtggtggcgttgactttgacgttgtccggcagacggctgacctgccagttggcgccgtcatactccacgcggtaatcgttggcttttaccttgctggtatcggtataggagaccgatagcgaggcatcgccggtattgcgcgtgttatcaaccacccgcgcgccgctgaagctgaagaaatcgcccccctgctcaccgttgagatcgaagccctcgcggtgctgctgattaaagctatcggccatcgccagcgccagttggccgagctgattgcgcacgccgtccagcgtctcgctgcgaaaacgcagcacgccgctcaggctgccgctggtgatctgtccttccggcacttcgctggcgccgctgccgcggttatagccgagagtcaggcgcgaagagtcgctgctggaagggatcgcttccacctgatagctgttgttgccctgcaccagggtcaggccgttggcgaaggagacggtataggcgtcgccgtcctgctgggttacctgaacgcccaccagttggttgagttcgctgaccagctgatcgcgctgatcgagcagcgcgttcggttcgccgctggcgctgccgcgcaggcgggtaatctcatcgttaagacgggcaatctgctggctatagctgttaatctgctgggcggtgtcattaatctgctgattaacgccgctatccatgtcgcgcagatatttatcggtattattaaactggtttaccaggccgttagccttgcccagcaccgtctggcgcgccgcgtcgtcgccggcgttgctcaccaggttctgcaaattggtgaaaaaatcctgcaggctgcccgacagggtattggttttgctggccagcagattatcgatctgcgaaatcttttcgtagtaggcgttctgcgaaccggccgcgctctgcgcgccgcgcagttggttggtgatgaactggttatattcgcggttcacgctggtcacggtcacgccgttaccgataaaaccattcatggtggccaggccgccgttttgggccagaatcgccgtctgccggttataacccgccacgttgtagttagagatattgttgctgacggtactgagcgccacctgcgccgcattcagtccgctcatcgccgtattgattaagctattggacatcagggttccttatgctgccaagtcaattcgctcagcttgcccttgttatcgaccggagaagtaaaaacttgagtaaatctgcctgcaaaattccgcagctgcttttaggccggatggcgctaccgcttaccgggctacagcactgtgcgatttggtagcccggagaaggcgcgaccttcgaacctagaacagatcgttaatatccgcggcataggctttcaccgcctgcgccccggcgtgcttcatctgctgaatcacgctgaccagcttgctggcgtactgcgggtcggtggcgtagcccgcgcgctgcagctcgtgcgccgcttgctccggagtggacgcttcggcaaccgaggcataacgcgggttgttggtcagcagcttgacgtaatcagcaatcgccgagaagtaggaatcgtagacgcggaatttggccttcaccttcttcgccaccccatgttcaaattcagtggtggtgatctcggtaaccggccccttccagttgcccccggctttaataccaaacaggttgtagctcggcgtaccgtcagcggtcgggatttctcgctgcccccagccggattccagcgccgcctgggcgacaatcagctgatgcgggatcccgctgcgctcactggcggcgcgcgcaggcattgacagacgggcaacgaagttgccgttatttagcgatagcggcgcggcggaaggcggcgctttcggcaccgcccggcggatcatctgctccagcgcctgattcggcagcgtctgcagcacctcattatccagcgccatcggcgcggtgcccgccgtttcgctggggaccgcgttggcgttgctcatctgcttgaccatcatgtcggccagccctaatcccttttgcgacatctgctgagcaatctgctgatcgtacatcgaggtgtagagccgggtctggtcgctgctgagtacgccatcctgcggtagcgcggcgcgcatgctctttagcatcatctgtacaaacatgccttcgacctgctgcgccacctgcttgaggttaccctgcgggtcggcggcggcatcgcgcttcaggccgttcagcgcctgggcatcataggcggcgcccgacatcgccataacatcgctggccattagataatttccagtttggcgcgcaggcagccggcgctttgcatagcttgcagaatcgacatcaggtcgattggcgtcgctcccagcgcgttcagcgcgcgcaccacgttgttgaggttggcgctggcgttgattttctgcagtgaaccgccctgctgctgcattgaaatctgggtattcggcgtgaccaccgtctggccgccaccgaacggcgtcgtcggctggctgacgctggtttgtctgtcgaccaccaccgacaggttaccctgagccaccgcgcaggagtcaaggatcacctcgcgattcatcaccaccgaaccggtacgcgagttgatgatcactttggcgtccatggcgccaacgttaacgttgatattctggatctcggcaaggaaacgcacctgcgagctattgccctgcggcaccagtacctgaatggtgcgcgcatcgagcggcgatgcggtgccgccgccgcgctggcggttaatcgcatcgctaatctgctgcgcgagggtgaaatcttcatcattgagctgcaggttgagcaccccgccgctgccgaacgtggtcggcagttcgcgctcgatggtggcgccgttgctgatgcgtccgccggccaactgattgacctgtacgctgctgccgcccgccgccgcgccggcgccgcccaccagcacgttgccctgggccagcgcataaacctggttatccacccctttgagcggtgtcatcagcaaggtcccgccgcgcaggcttttggcgttgcccattgatgagaccaccacatcgatattctgccccgcgcgcgcgaaaggcggcagcttcgccgtgaccatcaccgcggcgacgttcttaagctgcatgttggtgcccggcggcacggtaatgccgagctgcgatagcatgttgctcaggctttgggtggtaaacggcgtttgcatggtctggtcgccggagccgtcgagccccaccactaggccgtagccgattaaggcgttatcgcgcacgccctgtaccgtcaccagatcgcgaatacgctccgccgtcgccggtaagctggccgcgccgattaatagcgcaatgatgagttttttaaccatgtgaatctcttttcagtaacagcgcaaatggcccgctcattagtacggggagacgttgaggaagaaccgctgcagccagcccatcgtctgcgcttcattgatgtagccgttgccgacatactcgatgcgtgcgtccgccacctgcgttgaggttaccgagttgctaccgctgatggtgcgcgggttaaccaccccggagaagcgaatgaactcggtgccctggttaatggcgatctgtttttcccccaccacgtgcaggttgccgttgctcagtacctgattaacggtgacggtaatggtgccgttgaaggtgttattggcgttcgccccgcctttaccgccgaaactgttatcgccggaaatatccatatcggcgcgggcgttgcccagcaggccgtctaagtagcgcggcgcggtggcgacgccaaacttgctggaaccgttacggctggcattggcggaagaactcttgctggcgctgacgttttcctgcagcacaatagtcagcgtgtcgccaacattgcgcgggcggcggtcttcaaacagcggctgatagccgtagttcatcggctgcgcggcctgaaaaattgagccgttcggtaccggtgcggtcggcggcgcgggctgcgccgaggtcgagccatcgaccaacggtttatgcggaatgtacgcgcagccgctcagcgtcagcatcaccatgcccgccagcaagcgttgtccctggcgcggcagggtggccatcgaatgtgtggttaccacggggtatcgcctttgttacaccaaaaaagcgacgggcgcggcaggcgacgcccgtcatcaaacattacagctgggtcagcttctgcagcatctgatccgaggtcgaaaccgctttgctgttgatctcataggcgcgctgggtctggatcatattaacgagctcttccgccacgttgacgttagaggtctcgacataaccctggtagagcataccggcgccgttcaggcccggcgtgctctcattcggcgcgccggagctttcagtttcctggtacaggttctcacccacgctttcgaggccgctgtcgttaataaaggtggttaacgtcagttgcccgacctgctgggcggcggtctgaccctgctgggtgacgctcacgatgccatcgcgggcgatggtaatggtcaacgcgttggccggaatagtgatcgccggctgcacctggaagccgctggcggtcaccagttggccgttctgatcgatctggaacgagccgtcacgggtgtaagcctggctgccgtccggcagcagcacctggaagaagccctggcctttaatcgccacgtctttgctgttgttggtctgcgacagattgccctggctatgcagacgctcggtggcgaccgggcgcacgccggtaccgatctgcaggccggaaggcagcgtggtctgctcggaggactgcgccccggctgacgcatggtctgataaagcaggtcttcaaacaccgcgcgctggcgtttaaacccgttggtgctgacgttcgccaggttgttggcgatcacgtccatattggtctgctgcgcatcaagaccggttttcgcaatccataaagagggaatcattggttatttcctttggccgcgggccgactggctatcagcttactgacagcagagaattcgcccgctgttcgttctcatccacgctgtggatgaccttcatttgcatttcaaagcgacgggcgttggcgatcatatcgaccatggtctccatcggcttgacgttactgccctccagcacgcccggcatgacccgcacctgcgggtcgttggccaacagattgccgcggcgctgctgggtttccggggtcaggcggaacaggccgtcatcgccgcgcatcacttcgcgcgcatcggctttcaccagcttcaggcggccaatctgcgcgatggtgttcggtgggtcaccggggttcagcgccgaaatggtgccgtcggccgcgatagtgatttccgccgatggcggtacctcaatcggcccgccgtcgccctgcagcggcattccctgcaccgtcaactgaccgttagctgaaacctgaatgctgccgttgcgggtataggcttcgccgccgcccggcaggctgagtgccagaaaaccgtcctgctgcagcgccacgtccagcgggcgcccggtgtagttcagcgccccctggctcatatcggcgcccggcgtcgaggccgccaccagcgtacgggtggcgaggctcggcccgtcaaccggcaccgcgcgcagcgcggcgagctgggcgcgaaagcccggcgtcgaggcgttggcgagattgttggcggtaatcgactgttgctccagcgtctggcgcgcggcgcccatcgcggtataaatcgcgtgatccataactcagttccgttagcgcaggctgaccagcgtctgcaggatcgaatcctgcgtcttaatggtctgggcgttggactgatagttacgctgggcgacaatcatgttcaccagctcctggctcaggtcgacgttggacgactccagcgcgccgctggtcagcttgccaaaaccgccgccgccggagagtcccacccgcggctggcccgaggcgccggtctcctgccagacgttatcgccctgcgacgccagcccttccgggttggagaagttggccatcacaatctgccccaggacctgggtctgctggttggagtagataccgacgacggtaccgtcatcgttaatctggaagttggtgtattcaccggcggcataaccatcctgcgccactttactcaccgaatcgctaccgacgttctgctgcatactaccggcgaagctgagcgtgaagttctgcgccggtgcgccgtctttcgcgctcattggaatggtcatactgaactcgcccgcctggccgttaacgctgaccaggttgccgctggtattgaactccatggtgcccgcgctgaccgcagcagcgctgccgtcctgggtataaacctgccatttgttatcgtcggttttcacgaaataggcgttgatgttgtgggcgttacccagcgaatcgtaggcggtgatggtgttgacgtagttatagctatcctgctttgccgggtcgaaggtcttgttctcgggcactttatgcgtcgacttcagattggcgaccatttcgccggaagtcgacgctttggcgttcatcatcccttccggaatgctcagcggtaccgggttggcgccctgctgaatggtcggcggcgtgccggcggccggatagccggtaagctgcagcccctgcatattggtcagattgcggttttcgtccagcttaaactggccgttgcgggtatagaaaatgccgccgtctttatcctgcatgcggaagaagccgttgccgttaatcgccacatccagcgcgcggctggtgccggtagtggtgccgcctttaaagttctgggtgatcccggaaactttaacccccagcccgacctgcgaaccggcgaacatatcggcgaacgacacgctgccggatttaaaacccgcggtcgcggagttagcgatattgttgccaatcacgtcgagattggtggccgccgcatttaagccgctgactgcctgagaaaaggccatgttactctccaaatattgaggatatcgataaaatcaggtgcgaattacaggatctgccgcacttcttcgaggctggcgttaccggcaaggccgagatccagcttcgcgccgttgctgtcgttaatcacaccgttaaccatgccgaagtgcagactacgcgccaccagctgctcgccgttgcccttggcgttaatcgccactttataggcgccgtccggcgcggcggtaccatcatccagcgagccgtcccaggtaaaggcgtgcaccccggcggtgaggccgccaatctcaatggtccgcaccacctggccgttggcgttggtgatggttgccgtcacctgatcggcggcgcgctccagttcgacgccaaacggcgtggtactgacctggccttctttgctgccgaccagaatgttattacccggtaccatcacgccgtggccgatcagcgcgctggcctgcagcgactggttgctgttgatctgcccggagatcgcgccaagggtggtgttgagtttttcgatgccttgtacggtattaatctgcgccagctgcgaggtcagctcgttgttttgcatcgggttggtcgggtcctgatttttcaactgcgccaccagcaacgtcaggaagctgttatgcagatcctggctggtgctgcttttgctggcggaatcaagaaccgcgttattggtcgattcattggtggttgcggcgatagccatcgtgatctccggttactgacccaacgtcagggttttcatcatcatcgacttagtggtgttgagcacttcgacgttggcctgatagctgcgggaggcggagatggtattgaccatttcgcttaccacatcgacgttcggcatccgtacataacccttagcatcggccaacgggttgcctggttgataaaccatccgcgcgggcgccgggtcatcgaccacctgcgagacgcgcacgccgcctgtctgctgccctggtgccgcggccacttcgaacaccacctgcttggcgcgatagggttcgccatccgggccggtgacgctatcggcgttggccatattgctggcgctgacgttcatccgctgtgactgggccgagagcgccgagccggagatatcaaaaatattgagtaaagacattcgccttatccttgttgcagcaccgacatcattcccttgatctgaccgttgagcagcgtcaggtcggtctgatatttcaggctgttgtcagcgaagttggtgcgttcgcgatccatgtccaccgtgttgccgtccatcgacggctggtccggcacccggaacagcagatccagctccggcggctgcatggtctgcgccggaatatgacgcgccgccgtcaggttcagcgccatgccgttgccgtttacccgcccctgttgcaggactttattcagttggctggcgaaatcgatatcccgcgcctgatagcccggcgtgtctgcgttggcgatattggcggccagtatttcctggcgctgggcgcgcagattcagcgcctcctggccaaaacgcagagcagcgtccagtttgtcgagcatgctccctccgcaaggttagaatttggagccgacagcataaacgccccctgcgccaacctatcgcgggaataggggcaaaatgggccgctatttatctgtttagtccctcaggacagccgttacacttaacccctttccgggtggcgtgaggggaacgcgatgaaaagtaaaatcctgctggtcggcctgctgtgcagcctgagcgcccgcgccgacacgctggcgacgcaaatcgaaagcttcattaaaagcaaattcaacgataatgccgtgcaggtgaaagtgctggtgcgtacaccgcccgcccagtggccgccgtgtgaatttccgcagctgtcgctgccgcccaatgcgctaatcggcggcaatatcagcgtctccgcccgctgcgggcaggagcggcggtttattcagacccaggtgcaggtatttggccgttatctgacggcggcgcgcggtattagcggcggaacgccgctgaccccggcggatgtggtgctaaaatcaggcaggctcgatactctgccaccgcgtacgctgaccgacagtaagaaagcgctgggcgcggtgacgctgcggaatatcagcccaggccaaccgctgacgctgtcgatgctgcgtcgcgcgtgggtgatcaaagccggtcagccagtgcaggtcatggccgagggggacggctttagcatcagcggtgccggtaaggcgatgaataacgcggcggccgaagatagcgtgcgcgtacgcatggtttccggcaaaatcgtcagcggtatcgccggggaggatggatccatccgtattacgttataaaaaagtaaaggtttgccagcccctgccgataaccccattagaaacccattttggagatggaccatgagtatcgatcgcacccagcggttacagccggtttccacggtgcagccgcgtgaaaccccggccgacaacccgcttcagccgcgcaaggccgccgcggcggaaaccgccgttagcgccaccaaagtgaaactgagcgatgcgcaggcgcggctgatgcagcccggcacccaggatattgatatgaaccgggtcgaggctatcaaacaggcgattcgtagcggcgagctgaaaatggacgcgggcaaaatcgccgacgccctgctgcaggatgcgcacaacgatatccagcgccttgccggtagcaaaacagataaggcctgatgatggacagattacgcactctgctggataaactggcggaaaccctgcgggcgctggatgacgtgctggcgcaagagcaacaattgctctgtgcggatgaactgcccggcgtggcgctgcagcgcgtcaccgatagcaagagtcaactgctggcgacggtagcctggcttgaacaacagcgcccggcgctggaagccaaccttgcgctacgcgcgccttacccgggccatgaaagcttcggcgaacgctggcggcagatccagcagttaagccagagcctgcgtgaaaagaatcagcataacggcctgttgctcaatcaacagatcgcccataaccagcaggcgctggcaattcttagcaagaataataaatcgctgtacgggccggacggtcagtcgcgcgccgccagtctgctgggccgtaaaatcggcgtctgacaccctttctctgtatttcccccatggcgacggttatccgtagcgccgttttttgtcaggtggcgctacgcttacctgacctacggcggcatgtgatctgtaggcccgcgcaagcgtagcgccgccgggcaataaccgcgggtaacgagccattttcgcgccggatggcggctgcgccttatccggcctacggtctgtattaatacaaaacttttccccgcaactactgataattaacgataatctgattggcaatcgcccgcagcggcgggtttaacggcccgcgggtctgtacggaatagacaaaacgcagcggcccatctgccgcctcgcctgccaacgcgtggctggtgccgctggcgctggtcagcggaatacagcgattcaggctacataaatgtacctgcagcccagccggctccgctgacagcagacgatagcgccagctaacggtctgaatgcgcgcattgccgccaggcagcgtattgggcggcagcagcgcggcggaagaatcactcatcccgccctgttcaagggtgacgccgggcccttcggcaatccatgagcccgatgccgcgccggcggtaaccggcaataaaaggcacaataaaggaagatagcgcgtcatcaggccgctccaatggttgaggtcatgcgaatctggcgatcgtcgttgatctccaggttggaaagcaccgccatctgcggcaggctacggcgcaggaagcgcgccagcagcgggcgcagcgcgtggttaaccagcagcaccggcggcgcgctgagcatctcctggcgctgcagcgcctgccgcgcctgctccagcaggcggtcggcaagccccggttcgagaccgccgccgccctgcaacgcctgcagcagcagtcgttccagttgggtatccaggccgataacctgaatttcgccattgccggggaaccactgctgagcaatcgcccgcccagcgccacgcgcacgacggtggtcagctcgtaaggatcgctttgcgtcggcgcatgttccgccagcgtctcgataatggtacgcatatcgcggatcgatacccgctcggccagcagattctgcaacaccttatgcagtgtggtcagcgataccacgcccggtacgaaatcttcggtcagcttcggcatctcctgcgacacgcggtcgagcaattgctgcgtctcctggcggccaaacagctcgctggcgaactggccgatgaggtggttgagatgggtcgccaccaccgtactggcctccaccaccgtatagccctgaatttgcgcctgctcgcgcaacgcgctatcaatccacaccgcctccagaccgaaggccggatcgatagttttatcccccgccagctcgccgatagcgttgccggggttaatcgccagccagcgcccaggctgcgcttcgccgctgccaatttccactcctttcatcagaatgcggtagcgggcgggcgccagttcgaggttatcgcggatatgcaccaccggcggcagatagcccatctcctgggcgaatttcttgcggatcccgcggattcgccccaacagctcgccattttgctgaaaatcgaccatcgggatcagccggtaacccacttccatgcccagcggatcttccaactgtacgtccgcccaactggcttccgcggcctgggtattctcctgcacaatgggttcgtcggcggctttcggcgcctgtttttcgcgcccgcgcagccaccaggccagcccgagcagcgcggcggtaaacagcaggaagaccaggttcggcatccccggcaccagccccagcagcccaagtaccgcggcacacagcagcatgacctttgggttattgaatagctggccgaccatctgttcgccgacatcctgatcggtcgccacccgggtaacgatgaccccggcggcggtagagatcaccagcgccgggatttgcgccaccagcccgtcgccgatggtcagcaaggtgtagctttccgccgccgcgcccagctccataccgtgctgcaccacgccgaccagcagtccgccgaccacgttaatcaccataatcattagcccggcgatggcatcgccgcgaacaaacttgctggcgccgtccatcgagccgtagaaatcggcttcctgcgtgacttccgcgcggcgttttttcgcctcttcttcaccgataagcccggcgttcatgtcggcatcgatcgccatttgcttacccggcatgccgtcgagcacgaaacgcgcccccacttcggcgatacgcccggcgcctttggtgataaccatgaagttgatcagcacgaggatgataaacaccacgataccgatggcgaaattaccgccgaccaggaagtggccgaaggcctccacgacccgccccgcggcggcggccccggtgtgcccttccatcaaaatgatgcgcgtcgaggcgacgttgagcgacaggcgcagcagcgtcgagaacagcagaatggtcggaaacgcggcgaagtccagcgtgcgctgggtaaacatcgccaccagcagcaccatgatcgacaacgcgatgttgaaggtgaaaagcaggtcgaggataaacgccggcagcggcagcaccatcatcgacaaaatcagcaggatcaggatcgggccggccagcacctgccattgcgtatctttaacattccccggcaaacgcagcagggaggccaaattagccatcagagtcactctcttttgcaaaatccagtgcttccggcaccggtaaacgttgaggttttttcgggatcaggccgccctcgcgccgccagcggcgcagctgataaacccaggccagcacttcggcgaccgcggcgtagagggtggcgggaatatgctggccaatctcgctatggcggtagagcgcgcgggccagcggcggcgcttcgagcatcggaatacggtgttgcgctcccagttcgcgaatgcgcagcgcaatctcccccgcccctttagccagcaccttcggcgcgctcatttttttatcgttgtactgtagggccacggcatagtgggtcgggttagtgacgatcacgtccgctttcggcacatcggccatcatccgccgctgggcaatcgctcgctgctgttggcggatccgccctttaacatgcgggtcgccttcctggtctttgaattcgtcgcggatatcctgtttggtcatcttcagttttttgaagtggctccacagctgataaaaaacgtcaaacgccaccatcggcgtcaatccgagcaccaccagaaaaccgcagtagaggatcatctgcagcgcattggccaacgcgtcgagcggctgttgggtcatcagatgcagcatcgccgcccagttgtgccacaggtacagcccggttacccagccgaccagcgtggctttgagtatcccttttaacagctccgccagtacctgagtggagaacatgcgtttcagaccggaaagcggatttagccgtttaagatcgaatttgagcgacttggtgctgaataaaatgccgccaagcagcatcggcgcggccagcgccaccagcaccagcccggccattaccggcagcaatgccagcaccgcctgacgcagcagcattcccagctggcgcagcatttgtttgtcattgctgaccatcccgtggtcaaagtgcaggccctgcgtcagcatctccgccagttggcgagtgatattgctgccggacatcaggataatggcgagcccggccaccagcatcagcaccgaggtcagctcgcgcgagcgcgggatctggccctcttcacgcgccttctccaaccgatgggcggtgggggcctcgcttttttccagatcgctgtcttccgccaagcctgcagttcctgtgtcgggagggtaaagaatggcggtcagcatgccaaaaaaatggcgaagtcattggcggaacaacggcgaaaaagaggggttatttcacggatgagggaaaggcggcaggggcgcagcgttctgcgccccgcctggtcagaaaccgagactatcgagcagatcgtcaacctgcgcctggttggcgatgacgccgacgccgttctggtcaagctgcgggccgttgagcaggctatcgttggcccgtttctctttcaccggtggttccggcatgttttccatcagcaccatcagcagctgcttttcaatttcctgcaccacgtccatcatgcgcttgataacctgaccggtcaggtcctggaaatcttgcgccatcatgatttccatcagttgggcgttggtaaaggatgtatggcccggcacctgatccaaatactcacgggtgtcggtcaccagcgcgcgcgcgtcgtccagttcgatcgggttagcgaaccactcatcccagcgcgattttagcgcgctggcgccggactccagttcggcctggcgcggctgcgccgcctccacgcagctcaacgcccgttccgccgcctgcgccgtcatggtgacaacgtaatcaagacggtcgcgggcatccgggatcgcctcggccgcctgggcaatcgcctgatcgagccccagctcgcgcatgctgtcgcgcagcatgcgggtgagctggccgatacgggagattatctctcccgcggtcgctgcatcgctggcaggcattggaatctctctcatcgccctctccttacatgcccaatttttcaaaaatcttgttgagcttttcttccagcgtcgccgccgtaaaaggtttcaccacataaccgctggcgcctgcctgcgcggcggcaataatattttcttttttcgcttccgccgtcaccatcaataccggcatcgccgccagcgcggcgtcggcacgaatggtctgcagcagctccagaccgtcgacgttgggcatgttccagtcggagaccacgaaatcaaagctgctggcccgcagcttatttagcgcgtccgcgccatcttccgcctcttcgacgttgttgaagccgagctctttaagcaaatttctgatgatacgacgcatggtggaaaagtcgtcgacgaccagaaaacggagattcttatctgccattactacccctgaacagtgtcatttttaactcatttcacaccacgccgccggaacttcccggcggcgtgaatttaaattcgcagcgcctggccgccggctatctgcgccagcatgcgttggctcatgcgctccagttcaaccacttcgttgaccccaccgctggcgatggcctcgcgcggcatgccgaacaccacgcagctcgcctcactctgcgccagggtataggccccggcgagatgcatctccagcatcccctgcgcgccgtcgttgcccatgccggtgaggatcacccccaccgcattgcgcccggcgtggcgggccaccgagcgaaacagcacatccaccgagggacgatggcgatttaccgccgggccgtcgtgcaacttgacctgatagttagcgccgctacgcgccagctccagatggcgatccccaggcgcgatataggcgtgtcccgggagcacgcgttcgccctcttccgcctctttcaccgtgatctggcacagcttgttcagccgttcagcaaacgagcgggtaaatcccggcggcatatgctgggtgatcagcagcgccggactagtggccggcaacggttgtagcacctgacgaatcgcttcggtgccgccggtggaagcgccaatggcgatcagcttctcgctgctcagcagcggtccgtggcttaaaatggccggcggctggccattggcgcgctgcggcagccgcgcccgcgcggcggtgcggatcttttcgcctatcagttcgctgtaggccagcatgccttcgcggatcccgagttgcggtttggtgacgaaatccaccgcccccagctccagcgcgcgcagggtaatttccgaacctttcccggtcagcgatgaaaccatcaccaccggcatcggccgaaggcgcatcagcttttcgaggaaatcgaggccatccatgcgcggcatttcgacgtccagcgtcagcacctgcgggttaaattttttgatcagatcgcgtgcaaccagcgggtccggggccaccgccaccatctccatatcggcgtgaccgttgacgatctcggtcatcaactggcgcatcagggccgaatcatccacacataacactctgattttactcatcacttctccttggtcagcccatacacggtctgtccacgcaggtagaaatcccggctgatctggctgaaattctcggagtgaccggcaaacagcagccccccggtttaagcaaggggacaaagcggcgcaggatgcgctcctgcgtcggtttatcgaaatagatcatcacgttgcggcaaaaaatcgcgtcgaacggccccggcagcgcccactctggcgccagcagattcagcggctggaagttgacccgcgccgccagctcctgacgcacgcgcacaagcccctgatgcggcccggtgccgcgcagaaaatagcgctgcatctgcccggccgtcagggtacgcagatcttcatggcgataaatccccgcttcggctttctccagcacctgggtatcaatgtcgctggcccagacctgacaaccgctggcgcgatcccccagcgcatcgccgagcgtaatggcgatggaataaggttcttcgccggtcgaagcggcggtactccacacgctatagccgcccgggcgcgagcgcgcatgctccgccagaatcggaaagtggtgcgcctcgcgaaaaaaggccgtcaggttggtggtcagcgcattgataaacgcctgccactcggcgctgtgcgggtcgctttccagcagcgccaggtagtcgccgaaatcatgaatgcccagcagacgcaaacggcgcaccagccggttgtacaccatctcgcgcttatgcgccgccagcacgatcccggcgcgctgataaataagctggctgatgcggcgaaaatgcgcgtcggagagcggcagacgctgggccatctgcgccagcgccgatccgctttcacgcgccgcggttgatgtcgtttgcttcatgccgactcaccggcaaaatacgagcggtttatgcggtttgacaatccagggtctcctttaccgtggatgaggtttccggcgcgacgaagttgtcgtccgccagacggaataccgccactgcatcggcgagggtaatcgcctgctcttccagcgcagcagcggcggaagcggattccaccaccagggcggcgttctgttgcgtgacctgatccatctgggtaaccgcctgcgtcacctgctcaatgccgcggctctgctcatcggaggcggaggcgatttcgcccatgatgtcggtcactcgggttaccgagcgcacgatgtcctgcatggtggcgccggaattttccaccagcaccgagccgtgtttgacgcggctgacggattcatcgatcagtagcttaatttcttttgccgcctgggcgctgcggctggccaggttgcgcacttcaccggccaccaccgcaaagccgcgcccctgctcaccggcgcgcgccgcctccaccgccgcgttaagcgccagaatattggtctggaaggcgatgccgtcgatgacgctggtaatcgcgccgattttttgcgaactgttggcgatgtcgtgcatcgtggtgaccacatcatccgccagctcgccgcctttggcggcggttgaagaagcatcacgcgccagctgcgatgcctggcgggcattatcggcattctgttttaccgtcgccgttagctgctccatactggcggcggtctcttccagcgaagccgcctgttgttcggtgcgcgaggagagatcgttgttgccttcggcaatctcctgcagtccgataagaatcgactccgcgccgtcgcgcaccgcgccaacggtaccaatcagcgactgttgcatgcgctgcaggctggcaaatagctggctgatttcgttacgcccatagacctcaatcggcgccgaaagatcgccgctggcgatacgttcgaaatggccgcgaataatattcagcggctgcaccagcatggttcgcagccaccacatcgcgctgagggtgaccaccagcagcatcaacaccgccccggcaaccaaccagattgaccaaccgtaggcctgctggctggaggcgctggcttcatcggtcgtcgccttcgccagctgcagatattgcacaaagtcggcctcgaagcggtcctgtattttttgcgtcggctggtccataaaggcctgcaggttgcgattttcgaggaacacgatcagttcgcgcagcgcgccgcgtagcttttcgtagctatcgcgcgtggcatcggccaactgctgttcctgctcatccacgcgaggcgtgtcgaggaactggttaaaatagagatcggctttttgcagcgagctgcgggcgccgcccatcagcgcatccacctgctcctgcggcaccttcagcgccgcgcgggtaccggcgcggttaagggtatttcgcgcctgtagcagcgatacccagctcaggctaagcgcatcgcgctgctggctactgacggtaatacgttcaagattgtggttgtcggcgcgtagcgcgacgtaagagagcccggtgctgatcagttgcatgatgcaaaaggagatcagcagcaggaaaagactggtagagatacggattcggttaaacatagcaatctccttggtagccggtctcggccggcttacaacgcaagagaggccgccgcgtgtagggatgcggcggccggtacccgttagaacgtctcccagttatcctggtagtcgctggcgctggtttttttatgcgtagcgatggcggcagggcggttttattgctgaccggcgctttatactcttcctgcccttccgacttcaggcggaagacggcaaccgactgcgtcagcaggctggcctgctcttccagcgcggcggcggccgaggccgactcttccaccagcgaggcgttttgctgggtgacgcgatccatttccgctaccgcctggccgacctggtcgataccgcggctctgttcatcggaagcagaggcgatttcgcccatgatgtcggtcacacgggtgaccgcattgacgatatcgcccatggtgtcaccggcgctttccaccagtaccgagcccatatccacgcggttgaccgagtcctcgatcagcgctttgatctctttggccgcctgggcgctacgctgcgccaggttgcggacttcacccgccacaaccgcgaagccgcggccctgttcacctgcacgcgccgcttctaccgcggcgttaagcgccaggatgttggtctggaaggcgatgccgtcgataacgccggtgatatcggcaattttctgcgagctactggcaatgtcgtgcatggtttccaccacgttggccaccactttgccgcccttctgcgcggtttcggaagcgcttagcgccagctggctggcctgacgcgcgttttcggcgttctgtttcaccgtcgccgtcagctgttccatactggcggcggtctcttccagcgatgccgcctgctgttcggtgcgcgaagagagatcgttgttcccggcggcgatttccgacgcgccgctatagatggcatccgccccctgacgcacgccgcttaccgtttcgataagctcgttctgcatgtgtttgaggctggcggccagcacgccgatttcattacggctggtcaccggaataggctgggtcaggtcgccggaggcaatacgtttgatgtgttcaatcatgcggttcagcgggcgcaccaggatatggtggatgcccatccacacgccgacgatcgccgccagcaccacgatgatgactacaattaaggtccagatggccgagctataagagctgttgctagcgtcaacggcgatttgatacagcttgccgttttgctgcagataggcgttataggtctgctcgaagtcgtcctggtatttttgcgtcggctggtcgaagaaggcgttgattttaccctcgtccagcagttggatcagctccgacagcgcgccgtacaggatgccatactgctgcttaagcttttccgtcgcctgcggatcctgacgcgggtcctgcgggatttttcataggcggcatagttgcgctcggcgcgggccagctcttctttcgctttcgccagcagctcgtcgatagtcgcgccgctgccgattttattggtatccatcatgtagcggatccctgcgcggttcagggagttacgcgcctgcagcagatcgacccgactttcactcagcagtagctgctgctgacggatggtttgcaggacggtgaagttctctttatcgcttttcagcgacgaaaaaaacagaccgcctgaaatcagctgcaatgcgccaaatagcaccagcactaataagagactggtgacgaccttaatacgattaaacatgtttccccttcctggaagcctgaacggccaggctttacgtatgtgactgaaagggttatcggcgtacggaaggggaactttatgccaggcggggactatttttaccgggcgcgaccaggcgcgccccgttgcttagtggcttttggcgacgttatcgaccagcgccatctcttcgctgctgagcagcttttcgatatccacaagaatcaacatgcgctcgccgagcgcgccaagaccggtgagatactcggtcgccagcgttaccgcgaattccggcgccgggcggatctgttcggcggtgagagacaacacgtcggagacgccgtcgaccacaatccccaccacccgctggccgaagttaagcacgataaccaccgtgttttcatcataagagacgccctgttgggcgaattttacccgtaggtcgataatcggtacgatcaccccacgcagattggtgacgcctttgatgaaatccggggtgttggcgatacgcgtcacctggtcatagccgcggatctcctgcactttcagaatatcgatgccgtattcttcattgccgagggtaaagattaaaaactcctgacctaccgtttcgccagccaatttgctgacggttgctaatcctgccatggtctgcacctgttaattatatgagatgagtcgttatgcggccgctgcgctcagcagcttttcccgattgagcatttgcagcgccgacacgtcgacgatcagcgccacgctgccgtcgccgaggatcgtcgccgcggaaattcccggcactttgcggtaattgctttccagattttttaccactacctgatgctggccaatcagttgatccaccaacagcgcataacggcggccggcgctttgcaaaataaccacaatgccctgagtggcctcggttttcgccccggcgacgtcaaacacccggtaaagctccaccagcggcagatactcgccgcgaacctgcagcatccgctcgccgccggccatcggatgcaggtcttcggcctgcggctgcagcgattccatcaccgcattgagcggcagaataaacacttcttcattgaccttgaccgacatgccgtcaaggatggcgagcgtcagcggcagcaaaatacgaatcgaggtccctttgcccgcccgggaatggatttccacgtgaccgcccatctcctggatattccgtttcacgacgtccatgccgacgccgcggccagagacatcggtcacctgttccgcggtcgaaaagcccggcgcgaatatgagcattccgacctcttcatcactcatgctgtcgctgaccgccagcccttgcgccgccgctttggcgagaattttttcgcgattgagcccggcgccgtcatcgatcacttcgatacagatattgccgccctgatgttcagcggacagaatcaaattgcccacctcagacttacctgccgccagacgggtttgcggatcttcaataccgtgatcgaggctattacgcaccaggtgggttaacgggtcgataatgcgctcgatcaggctcttatcaagttcggtggagctgccctgcagcgtcaattccacctgcttattgagcttaccggccaggtcgcgcaccagccgcgggtagcggctgaatacatattccatcggcatcatgcgaatcgacatcaccgattcctgtagatcgcgagcgttacgttccaactggctcatgctgttgagcagatcgccatgcgtcaccggatccaggtcacctgagcgctgcgccagcatggactgagtgatcactagttcgccgacgaggttaatcaactggtcaactttctctaccgccacgcgaatactggtcgattcgctggccttcgctctcggcgctttcggcggctcgaaggcagcaggctgcggttgggcgaccggcggcggcacaacttcggccgatggcaatggtttagcggcagtggttggcggcgtggtaaagctgatctgttccggctcaagaacgaaacagagcaccgcgcaaatatcttcttcgctggcggtggtcagcagggtcacctcaaggctattgtcagtttgcagcggatcctgtacctcgccgagattgccaagctcttccagcatcagcggaatttcattggcttttagcccggttaagctcacgcgcataacgccggcgatggccgtcggcgcaggctgggccacgacgggtggcgcggctggcgcgtcctgctgctgcgcttccagcgccagctgccgcagcgcctggcagatatagtcaaagctctcagcgtcaggctgctgcgaggttttataggcgtccagttgctcctgcataatatctttggtttccagaaacagattgataatttcggtgctcaagcgcatctcttcgcgccgggcgccgtcgagcaggttctccagcagatgggtggtttcctgcaatacggtaaagccaaacgtcgccgcgccgcctttgatcgagtgcgccgcgcgaaaaatagcgttcagcggttcgatatcgggagcctgcggatccagctccagcaggtgttgctccatgtctgccagcagctcatctgcttcatcaaaaaaagtctgataaaaagcgctaatatccatgctcatggggtcacctcagggtgtgaatcgcggttaaccggcgcgggcgcgaccagctttggcagcgtatccggctggctaatctccagcgcattgctttcgccattttcatgttcgatgctctgctgggtctctttgttaagcaccagtacggtaatgcggcggttgatggcatcatcggcgccgtgctgtttcaggctcatggtcgccgccataccaaccacccgcagcaccttcccttccgccaggccgccggcgatcagctcacggcgcgaggcgttggcgcgatccgccgacagttcccaattgctgtaaccacgttcgccggtggcgtaggggatgtcatcggtatgcccggcgaggctgatcttgttcggcaaatcattgaggattggcgcaatcgctcgcaggatatcgcgcatatagctttcaacctgagcgctaccggttttaaacatcggccgattctggctatcgataatctgaatgcgcagtccttcgtccatcatgttgatcagcagatgcgggcgtagcgccttcaggcgcgggtctgactcaatcaactgatcgagcttgtcacgtagtttgttaagccgtagctcttcggcacgtttatctgcggtattgatctgcttgctgaccaacccgacttcacgggtcgggtcttcgccgccgccggggattgggctgctttccgagctgcttttatcgccgctggtcagcgccactttcagcggcgtacggaaatattcggctatttgcgtcagctcctgcgggctggcgatcgccagcaaccacatcaccagaaagaaggccatcatcgccgtcataaaatcggcataagcaatcttccacgagccgccgtgatgggcgggctggtgtgatttgcgctttctgaccagtaccaccgggtgattatgcttcatgcttcttcgctttccgtcgcctgcgcgacaggcgctttcacctggcgcacgtgttcttcgagctcaacaaacgacgggcgctcggtggtgtagagggttttgcggccaaattcgacggcgatttgcggcgcgtagccattgaggctggagagcaatgtcaccttgatgcactgcatcatcttgacggtctcggcgcttttttgccgcagcagcgtggatagcggcgagataaacccataggccagcagaatgccgaggaaagtccccaccatcgcgttggcgataagcgccccgagctccgccgccgggcggtccgccgaggccagcgcgtgcactacgcccattaccgccgcgacaatgccaaatgccggcagagagtcgccgaccatcgccaggctcccggcgggcacttcgctctcctgttcgaaggtttcgatctcttcgtccatcagcgcttcaatttcaaaagcattcatgttgccgctcaccatcaggcgtaaataatcggttatgaactccaccagatggttatcggcaaggatgcgcggataattagagaaaatttcactttcctgaggattgtcgatatcgaactcaagcgacaacatcccctgttgacgggatttagcgagcagcaggaacagcagcgccatcagatccatatacagcgccttgctgtatttggagcgacgtaccattttgggcaaggcccgcagcgtggatttgatggcctttccgttgttgccgacgataaacgcgccgatgccggcgccgccgataatcaggaactccgccggctggtacagcgcgccaaggtggccgcccaccagtaaatagccgccaaataccgctcccagaaccacgagataacccaatatcactagcacacgcatacctcaaattaacaatgtggatggagggcgaggcaaacgcgccctggcgtaaaccaggcggggaatgggggcggcatgccgcccctgcgtattacacgtcgaaatggattgccgtaagtcgtcggaacggcgacttacatgacgcgtttagcctgctcgtccagcagttgagaggttatatcggccagttgcggagaaagtttacgtctttttacggcgcgcgacggcggttggcataatgtgcagacaaaatcgtgctgcggatggtgcgcgtgagtgatgaatgagccgccgcagctattgcaggcggagagctgcagcataccgctatcaacaaagcgcaccagcgtccaggcgcgggtcaacgccagtagcggcgcttcgcccgcgtcttgcggacactgttcgaggtacaggcgataggctttgatcaccgcttccactccgctgcatttgccgctcttcagcaggaacaaataggcgttgtagaacatcgacgaatgaatattctgctcccaggtcataaaccaatcggtcgagaacggaagcattcctttcggcggcggacttccacgcagctctttgtaaagtttaattaagcgcccgcgactgagctgagtttcactctccagcatctgcagacgcgcgccgagggaaatcagctccatggcgagctgaatatccttcgcttcctgaacaatacttttctcagccattatcaaacacttttcttcgccgcagcgccttctttggcgcggagctcttgcagcaggtgactggaaagcaggataccggtatggatctgctggaggtcatcaacgcgcgactctttggtcaattgctcgattgtctgatggtcgctgaagcgcagattgcacaccagctgattagtttcagccagtttcaccatctgcggtaacgtcagttgcgccagggtatcaaccatggtttcgtcaattcccaaacgaaacatcgcggatactttttcatcgttgatcagccgctgtgctaaaaataaatacgacaggttgaagtcataaatatgcttaagtaattcggaggtacccataatccctatcccgataagccatgttagaaaacatacacggggcgtgatacttaatcgcccgtgacctcagttatttccccaagaggcaattaaaacgctcactcgcgatagctaaaaaatcagctaatcgtcaaattcgccccactgttaatagtttgttacaggtgcaaactggagtggaggatgtaaagaatttgcttcgagagagttgaattgccatgaaactatttttagaaattctataagaatattcttaaggcggcgcaactctactcccgaatcattagcacacacaattaagtatggggaaattttgaatataatgagacattgatcacaaaaacaaaaaataataccggtaacaacacctcatttcgatcgctttataaccaacattcgatcatttaacgatcacaagtaaatgaattgccttaaaaaaagtgttatcaaccattgcaattagtttttttctgcacatttagaacaaaaaaataacattataaaaattgaagaataaaaatctaaacaagcgttaaattcaacgtaaatcattagttttcacggcaaaaaataaccctgatgtaatacaaggatattagatctaatactcgaatggcatatacggaaaaagtataaaaatcgaacaacaacagcctgggtttgcctgttttttcagcgcaagcaattgtacaagatgcgcgcaactcccccccctgtcatgacgcctggcgctattttcccgcgcctgtttgtggctgaacttcgccagaaatgtataaattttttataacatttacagcctggcatattaccccaaatgggtatttccccgggttatttttctaacattcttttaacgaaacgagcttattaccaggttagaataataaaaaatgagaagtaattaacggtgtcatccccatccataaagccatcatgaatatatttttaaaccacataacaacggcgagttaatattaaaaaatagatatatgaggatttttcattcgacaattaacccgttatcaccctgactctacccccttattattggtagggtaaaaatgacacatttatttgcacacctgtagtaaagaaaaaatagctagcgctaaaagtgcaatatcgcgactggatcacattttatcgttgctgctctcattttcatcacttccgtgtttcgttgaaatcagggttatgtttaaattagctaaatcggtttaataaagtttagctaaaaggaatctcagtatgaccaataaagtatgggtactcggcgatgcggtcgtcgatctgctgcctgagggtgatggacgtttattacagtgcccgggcggcgcaccggctaacgtcgcggtcggcgtcgcgcgtcttggctgcaatagcgggtttattggccgggttggcgacgatccttttggccattttatgcgtcagacgctatgccaggagaacgtggatatcagccacctttctttagaccccgcacagcgcacctcaaccgtcgtggtagcgctggatgaacacggtgaacgcacctttacctttatggtccgtccaagcgccgatctttttctacaaccagacgatctcccccattcacggccggccagtggctgcacgtctgctctatcgccctcagcgccgagcccagccggagcagcgcttttatggcaatggaacagattaaacgcgtcggcggtagcgtcagcttcgaccctaatatccgcagcgacctgtggcaggatcccctgttgttacggcgttgtctcgaccgggcgctggcattggctgacgtggtgaaactgtcggaagaggagctggcctttattagcggtagcgatgatattgccagcgggattgcgcagttccgcgagcgctttcagccaaaactgctgttggtcacgcaaggaaaagccggggtgcaggcgctgttccagcaacagcatattcacttcccggcccgtccggtggtcagcgttgataccaccggtgccggcgatgcctttgttgccgggctactcgccagcctcgccgctcacgacttccctgacgatgtcgccgcgctggagccgatcgtcgcgctggcgcaaacctgtggcgcgctggcgaccaccgccaaaggtgcgatgaccgccttaccgtaccaggccgatgtgaaccgccagttttaacgatataggcaggcaaaataattaaaccgttttagcaacattagcaaagcggcgattaggggcattctgacatcccccactagcccatgatgatgacagactttgtagagggtactatggattttcaacagatttctcgcgcgctgctgccgctgctcggcggcaaagaaaatatcgccagcgccgcgcactgcgccacccgcttgcgtctggtactggttgatgacgcactcgccgaccagcaggccatcggtaaagttgagggggtaaaaggctgctttcgcaacgccgggcagatgcaaatcatcttcggtaccggcgtggttaataaagtgtatgccgcctttattcaggtggccggtattagcgagtcgagcaaatccgaagccgcagacctggcggcgaaaaaactgaatccgttccagcggatcgcccgcctgctgtcgaacatctttgtgcccattattccggctatcgtcgcctccggcctgctgatgggactactgggaatggtgaaaacctacggctgggtcgatccgggcaacgccatctacctgatcctcgatatgtgtagttcggccgcttttattattctgccaatcctgatcgggtttaccgccgcgcgtgaattcggcggcaacccttatcttggcgcaacgctcggcggtatacttacccacccggcgctgaccaacgcctggggagtggcttcgggattccacaccatgaatttcttcggcctcgaggtggcgatgatcggttatcagggacggtgttcccggtgctactggcggtgtggtttatgagcctgcttgagaagcaactgcgacgcctgattcccgacgcgctggatctgatcctcacgcctttcctgacggttattatctccggttttatcgccctgttgataatcggcccggccggccgtgccctcggcgacggcatctcctttattctcagcacgcttattgcccacgccggttggctggcagggctgctgttcggtggactgtattcggtgattgtcatcaccggtatccaccacagcttccatgccatcgaagccgggctgctcggtaacccgtcgatcggcgtcaatttcctgctgcctatctgggcgatggctaatattgcccagggcggcgcctgtctggcggtgtggtttaaaaccaaagatgtgaaagtgaaagccattgccctcccctccgccttttcggcgatgctgggcatcaccgaagcggcaatattcggcatcaacctgcgttacgttaagccatttatcgccgcgttgattggcggcgcggcaggcggcgcctgggtagtctccatgcacgtctatatgaccgccgtcggcctgaccgccatccccggaatggctatcgtgcaggccagttccctgcttaactatctcattggactggctatcgcgtttgtggtcgcctttatcgtttcgctgacgctcaaatacaaaacggatgctgaataatgtcgcagccttctttgttaccgttggtcctgcaggccgtcatgaaccaccagccgcgcgtgcgccgggataaccactatccgcagtggcatctggcgccggtatgcgggctactgaacgatccaaacggttttatccacttcgatggtcgttatcatctgttttatcagtggaatcccctcgcctgcgatcacagctataaaggctggggcactggagttcgccggatctgctgcactggcggcatgaaccgattgccctgctgccagaggaggagtacgaccaaaacggctgttactccggcagcgcgatagataacgacggcatcctgacgctgtgctacaccgggaatgtgaaatttaacgatggcagccgtaccgcctggcagtgtctggccacgcaaaatcccgacggcacttttcgcaaacaggggccggtgctcgcattgccatcaggctatagcggacacgtgcgcgatcctaaagtctggcgcgacggcgatcgctggttgatggtgctgggcgcgcgcgatctggccgaccgcggcaaggtgctgctattcagttccgctgatttgatgcagtggcatagccatggcgaaattgccggtagtggacttaacggcctgaaagacggcggctatatgtgggaatgcccggatctgttcccgctcggcgatcggtatattttactgagctgcccacagggattgccgcgtgaggcacagcgcttcctgaacacctatccggcagtctggatgcagggccattttgacaaaaccgccgccacctggcgccatggcgcgattgaagagctggatagcggcttcgaattctatgcgccgcaaaccaccctggcggaggatggtcgccgtctgctggttggctggatggggttcccgatggagaagagatgcagcaacctacgcgggcccacggctggatccatcagatgacctgcctgcgggaactcagctggcgccacggcacgctgtatcaaaatcccgtgcgcgaactggcggcgcttcgcggcgaggcgcaaggctggcagtccgaaccactggcgctgcagccgatggaactcgccttcgaggttgcgccagacgatgcgctgacgctggatttcgctggcgcactgcagctttctctggacaggcgcggcgtacgcctggcccgtcgaagcctggtggccgatacagtcgattaccgttactggcgcggcacggcgcataaactgcagatcctcatcgaccgttccagcgtcgaaatctttattaacgatggcgtgggggtgatgagcagccgcttctttgcggattatcccggaaaactggtattccgcggcgcgacgccgggcgcattctgctgctggccgctgcggccatgcatggtagaataagcgttttgctttcaggctcctggctcgtgatgaaacctaaacgcattaccataaaagatatcgccgaactggctggcgtctctaaagccaccgccagcctggtattgaacggtcgcggtaaagagctgcgcgtggcgcaggagacgcgcgaacgggtgctggctatcgcccgcgagcagcactaccagccgagtattcacgcccgttcactgcgcgatagccgcagccataccattggtctggtagtgccagaaattaccaactatggttttgccgtgttttctcacgagctggaaaccctgtgccgcgaagccggcgtacagctgcttatctcttgcaccgatgagaatcccggtcaggagagcatggtggtcaataatatgattgcccgtcaggtcgatggtttaattgtcgcctcttgcatgcatagcgacgccgactatctgaagctcagcgaacagctgccggtggtgctgttcgaccgtaatccaaacgacagcgccctgccgctggtgatgaccgattcactggcaccgacggcggaacttatcgcccgtatcgccgggcaacatgcggatgagttctggtttctcggcgggcagccccggctctcgccctcacgcgataggctggccggatttagtcagggattggcccaggcaggggttgagttacgcccggagtgggtcatcaacggcaactatcacccaagctcaggctatgagatgttcgccgcgctgtgcgctcgtctcgggcggccgccgaaggcgctgtttactgccgcctgcggtctactggaaggggtactacgttatatgagccagcataatctgctggattccgggatccatctggccagctttgatgaccactatctttatgattctctatcgctgcgcatcgacactattcagcaggataaccgccagttggcctggcactgctacgatctcatcagtcagctgatcgacggtaaaacaccacagccgctacagcgttatctgccagccacattgcaaatgcgttatcagcccgtcagataataacgggcctggatcgtagttcaggcccgtactgttagcggttaattgtcatcagaaaggtttcgttggcagatactttccatcgaaggtaatcaccgcacgatgtccgccttccggatcgctgacttttttcacatccagcttaaaattaatcgcgctgataatcccgtcaccgaatttttcgtgaatgagcgctttcagggtggtgtcgtagacctgcagcatttcatagaagcgatacatggttggatccgtcggcacgcggtcctcaatggagcccctgacggggatcgtttgcagcagcaaaatatcatcgtcgttaagttccagtttcgctcctaccattctcgctacttcggcaggcagcggatgctggcccaataacgcggccgttacgaaagcttctgataaaccggtgccttcaacaagctgtgcaaaggagagatcctttttggctttaatcagcaaaattttattcgctaactccagacgaacttcgcggctaacttgtgactgaatcatggtatgacctcgctatatagtcgtgaaatgaaattactgaccgtaaaccggtaccgctcgggtatccggatgaccggccagcgaaataaaagctctggcattgccgtcataagcggcaatcgcccccgtttcaatgtcatatacccagccgtgtagcgccagacgcccttcctcaagcgccaggcgtaccgcaggatgggtttgaatattcgccagttgggcaatgacattttcatgcaccatcgccgcggttttggcctgcggatcgcgatgctcgcgggcatcgttaaccacttttgctgaatccgcatattgcaaccagtgcttaacggcggggacatgatccagacagctacactgcgcgatcgccgtcatcgccccgcaatcggagtgaccgcaaatcacaatatccgtgaccttcaggacggcaacggcatactccaccgatgccgacacgccgccaggctccggaccgtaagaagggacaatattgcccgcattacggatgacaaacagatcgccgggttcacgctgggtgaccagttcaggaaccattcggctatcggaacaggaaataaacagcgtattgggactctgccgggaggctaaacttttaaacagttcagcgcgctcaggaaatgcatcacgttgaaatttaagaaaaccgtcaatgatttctttcatgataatgtctacctcgctgtggaatgacagggaggttacgcgccgtatcgcataaaataaaagtcttgtttataatccatttcatccaaaaaacttatgggttgtaagtgtgaatattcgctacgttagatatttcctcgccgtcgccgaacatcaggggtttacccgtgcggcggaagccctgcatatttcgcagcctgcgctctcacagcaaatcaggatgttagaagagagcctcgatgcgcagctttttgaccgtagcggccggcatattcatctaacggacgcgggagaggtgtttttgcagtatgcccgtcaggcatttcaactactggatgagggccaacgcgccattcatgatgtcgaagacctcagccgcggctctctacgtattgccgtgacgcctacctttacttcctattttgtggtgcccttagtggcggaatttcatgcgcgttatcggcatatcacgctggatattcaggagatgtcgcaggagaaaatggagggcctgctgctggaaaatgagctggatattggtattgcctttgccgggggaccgcgccagacattgtttccaccccgctgttacaggaagtgctggcgttggttgtcgcggcccatcacccgctggcccgcgaagaatccctcaccttgagccagctggccgcggaggagtttattctgctcaatcatcatttcgccacccggttgcaaattgaccactgcttacagcgagccggttttcacccgcaggtgaccattgaaatgcactcgatcaatgccatcctcgatatcatccagcgaacccaattagtgaccattctgccgctaaatgtcgccgcccagcgcactggcctggtgaccaggttgttggaagaagcaacgcttgagagaaccgcggtattaatgcagcgcaaaggcgcccggcaaaaagccgcggcgcggattttcgccgaaatggcccagcagctggcagcccgaatagaaagttaagcttacaacggtgtggccagcctctggcccgccaccttccttcgacagcattctcaccgcggccagtatgaccatttacgcaaaactgatttcccgcgattggcatactgaaattgttaacgatatgtataattttatctgctaagcggtattcaatattccggcttgaacgtcagcattattttcaccctaccttattcccctgacaaggaattgacaatgagtgaacgctctcatgaccgaggtaatagccttgcgatggtcatatataatctactcaatcctgtgccttacggcttttttatcgccggtctcatcttcgatattatttatctctacagcactaacgtgatgtggggaaaatgcgccagttggcttattgcccttggccttatttttgccatcattccgcggttgattaatctggcacaggtctggttttttactcctcgacgcccggcggcaaaaattgatttctggctaaaccttatcgctattattgccgcgttggtaaactgttttgttcatagccgcgacgcctgggcgattgcgccgcagaacgttatttattcatcgattaccgttatctgtctgcttattgccaatattatcagctccgcctgcctgacaaataataagggggcccgccatgaataaattactactgcccctgcccgttatgttcgccacggcgcttgcgctgtcaggatgcgatgagaaagcgaaactcagcccggatcagcaggtagggcccgatcccgtaatgccgaaggcccaggatttcctgatgccgccgatgcaggttcctcgcggcgtgggctggaagagagatggacaaccggcggttgcccaggggctgaaaatagaaaaaatagccgatggattcctgcatcccagaatggtctatgtcctgccaaacgacgatattctggtcgttgaaagcaacagtcctggcgaggaggcgctgactacgccgaaacagctgattgccgggatagtgaaaaatcagtcaggcaaaggtggaaaaggcgggaatcgcattacgctattgcgtaaaaacgccagcggctgggagaaacatattttccttgaacacctgcactcacctttcggcgtccagctgattggcgatgatctttacgtcgccaataccggcaacatcatgcgttatcactaccagccagggggacacatatcagcgatgcggggagcgagctggctgacctgcccagcaccgtcaatcaccactggaccaaagcgttactggcaagcccggatggtaagaagctgtatgtgggcgtcggctcgaacagtaatatcaccgagaatgggctggatattgaatatcgtcgcgccaccgttctggaggttgatacggcaagcggtgcaagccgtattttcgccagcggtatcaggaatcctaccggactcggctgggaaccgcagacgggcaagctttgggccattgccaatgagcgcgatgaaatcggcgccgacctggtgcctgattatttgacttcggtgcaggatggcggattttatggctggccgtggagctatttcggacagcatgtggatcgccgcgtgcagccgccgcgcccggacatggtcgccaaagcgatcaaaccggattatgccctgagttcccacgttgcgccgctgggaatgctgttttataccggaaaaatgttgccgcaaacctatcagggcggcgtgtttatcagcgagcatggcagctgggaccgttcgccgctgaatggctataaagtcagcttcgtcgcctttaaagacggcaaaccggtcggtaaaccacagagcgtggtcaccggctttgtctcccgcgatgagaaagagctgtacggcgcgccggtcggactcgcgcaagataatgaaggggcgttaatcattgccgatgatgtcggtaataccgtctggcgcgtcagcgcaaaataaaatatcactatcaattatccggcttcccgcggtatggggagccttttttatatcctgagaatcattatccatagatattgccgggaataattcgagaaacacagtgataaactgagttatcaggaccgctattgtagttggatacaccggaacaggttgctgagaaacattcatcatcaatgagacatagagcagatgaaccatttatccgcaatcagaactttcgttagcgccgctgactataaaagttttagcgccgccgccaaagccttaaatattgaagtatccaccgtctctcgccatatttccgagctggaggcgtatttacaggtgacgttgtttaaccgctcaacccgtggattagcattaaccgaaaccggggcatttttttactcgcacgcccaacaactgttattaaaatgggaggaaacccgtcagttaacttccgcactggataaacaaccttccggcctgctgcggttaagcgtacccagtaccttcggccgtctgcacgtgatgccttttgttgatgaatttcttcgcctgcaccccaacatttcgctggatattagctttaacgatgaagtgcaggacctgattgaagcgcgcatcgacctgagtattcgcatcggcattttgcctgactcctcgattcatgcccgtaaactggcttctcagacgcgttcagcctgggccagcccgcagtggattgcggaaaaccgcccttctgccacgccgggcgccgaccagcagcagatcaatatcgtgatgttttctcgcctgcatggcgccggttggtatacccgtaagatgggttcagaagatgaatggcagcgcatcccgattaactaccgactgagcgttagcgatagcgccgccatgctttatgcctgcgtcaatcacaccgggattgcgattttaccgaactggctatcgcagcaggctgaagaacaagggctcattcaacgggtattcccggagtgggaatttagtatgttccctagcgaaaccgccatctggatgctgtacccgcaaaacaggagagtaccgcataaagtccgagcctttatcgactttatggttgaaaagattgggatgccgccctactgggagaaggcggataattaaaacaaagagggccggtattccagcggggagcgtaaaccgctcactacggaatattaaatttaccaggcaagggaatgtatataccatgatctcgactctctcactgcttacctcttcccaggcccggcttttgagcggtgtggtacctgatttttacctttatgaagatcgaggcttacagctatttatccataaacaaggacgcaatggactcgtcttctctacggcgtctttacccatatttatctgtacgttgcagtagatgcgagagcaactgaaggaaaagaattgctgacttcaccggcacgattaaagtgactcccctccccaatgtttactctgttgctcaaaacccaaccagatcaaagggcaatagctgaaggataaagctaaaagaatttacgtggatgggagtttacatggccttctgtcaatctgactgatccgcaacggcgggaaaagagtatgtatgctgtttcatgttctgcatatccagagcgtagctaatattgaaatgccacaggctatagatagaagactaaatccataaagtgcggtcatcaaagtgttgtcctgagtaggtgtagggcttttcagcagtaaagcccctttcgttcaacagcacttcccgcatgaataaaccttcagtgaagccatgcatgcaccattactgaatggttgtctctactggcttttgctgatgcctgacatgtgatcgttcacaatcagtcgtgttcaaacacagccagttagacgtagattcgttacgttctcccttatcagtagctacgaaattgagaaatgcgtcacaatacagaaaacaacttaacaggttaaccggttaagttgagttgagtggttgatcgggcaaactggtacaggtatcgtaagactacgaaataaaatcaatgtagacagaaactggcaaaacaatgaaagcatcggcacagtcaacgaaataccaggtgattaaaacggccctgttagatgaaattagagacggtacctttaagcccggcgaaaaattttacagcgagtcggaattaaaagaacgctactctgtgagttctgccacggtaattcgtgccattcatgaattagtgaatgatggttatttgatccgctaccagggaaaaggtacttttgtttcgaaagccaaacgcaatgagagtattattttttcagagtcagataacgacttaaaaggtatgcagtcagttaaagttatccaatgcgaattagaaaatgtttctgacattaaagaaaagcttggcttaaaagatgatgaaagatattaccgcattgcgcgcttgaaatttgacagcaacaaaccttacgcactgcaaatttcccatatcccggctcactatttttccagtaaattgacggttaagaactcggctctcagttccatttacgaggcatttaaagtcaacaatggtcttgatatgtataccatgccgtaccgacaaactatatgcgcccaaaccgatgtcgagcctgaagtactgcagcaccttggtctcggcgccaatcagcccgttatcatgatgaagcgttttaccaataacgagcagggccagatcattgaatatattgaaacctggaaacggttagaatcattttatattgaaatcagaacaccagataaggggcaggatgaatcaaatattattaatctctcatggaggtttcgccagcggtgccagacaggccacagaattgattctcggcgcacagcctaacctccatgtagttgaactggatggtgagaaaggtatagcagtatttaaacagaaacttcgcgataaaataaccgccctcagtacagtagagtcaaacattattattctttctgatttaaaaagcggttcgccgtataactccgcaatggaggttattgtcagcaacaacctgtgggataatatcaccctactctctgggatgaatttaaacttaattctcgaaataacgatggcgattgatgaaaatcatactcccgcctcgctgaatgaaataataacaacggcgcgtgatggtatttaccatttacagcaggcagcgcttgccgcgcaaacaaatgacggagacgagtaaaaaatggagcacattgcggtctggcagatagcgttactaacgctctattcagggctggcgatatatgacggcaacaacacgacgcttgggctggtgaaaccgagcatggcgggcttctttgccgggatgattatgggtgacatgaacaccggtcttatcgttggcggcaccctgaacctgctggtgctgggcgtgggtaacttcggcggcgcatcgattccggactacatgaccggcgcggtgctgggaaccacctttgccatcatcagcggccagggcgcagcgttcggtgccaccattgccgtaccgattgggctcttaatggtgcagctggatatcctcgcccgcttcacaaacacctttattcatcataaggccgataagctgattgaagacggtcaggtgaaggcggcggcaagaatgaacctgctgggccaggtgcctatctcgctctcgcggatgctgccggtgctgttagcgctgctcctcggggcaaccttcgttaatgacgtcgtgacctggatccctgcttccatcatgaacggtctgaaagtcgccggcggcgtactgcctgcattgggtatcgccatcctgcttcgttatttaccgattaagaagaacatctcatttctgattctgggcttctttctgtcggcctatctgaaagtgccggtgctgggtgccgcactgctgggactggcgattgcgctttacgtcttcaactcagaaaaacaggcaacgcaaaccaccgagtccccggcaaatggagcaatgggcgatgaataaagtactaacacgcgtattctggcgctggtttctcttcggtcagtctggctggaactacgaaaaaatgcagggtcttggctatctgtacagcatctacccgttccttgagaagaaatacaccagacctgaagagcagaaggatgcagctaaagtacacagccagttctttaacaccaacaacaccatggcgcctgggatcctcggggtaaatatcgccctggaagagcagaccgggcttgcgggtaaagatgccgttgccgggatcaaaaccggtctgatgggaccgctggcgggcatcggagatacgttgttcttcgttatcccgaccaccattatcggttccgtcgcgtcatacctcgcgctacagggcaacccggtagggcttatcctctggctgctattcgctctggttcgcatgttgtttatgcgctttagcatcagtaaagggtatcaggaaggggtgaacctgctgggatcgttgaccaacagcctcaacaaaattacccgtgcggccaacattctcgggctgacggtcattggggcgcttattccctcggtggtaaaggcaaatcttaacttcgagttcagctacggcgaagtgtcgctgaagctgcagagcattgccgaccagataatgccggggcttattccactgctggttgtggggttcacctactggctgctggggctcaaaaagatgaactcaactcgcgtcattttcgttctgattactttaggtatcgttggctacaacctgaatattctcggttaagcaacacattgatttaaggaagttattatgaaaggtattgttcacatccgcgtcgatgaccgactgatccacggccaggtggctacccgctgggtaagccatttcaacgccaaccgtattatggtgattgacgacaccgttgctgcaaacgacgtcgaaaagatgctgctgcgcagtgcggctccggaaggctgcaacacctctattctctcttttgagaaagcgagcgccaatatcctcgccgggaactacgacggtcagcgagtgctgatcctgctgaaaacgccggagctggcgctgaagctgatgaactgcggcgctaccctcacccagctcaatatcggcaatatgtccaacaaagacgatcgtcgccagattaaacgttcggtaagcgttaacgatgcagagattgctgccatcaacgcgttgctggaaaaaggcgtagcggtcacagcacagatgaccccggaagaaccaaacgcctgtatcaccacgtttttaaaagccgataagggataaggaatgtcaccacatcagcagcagtattatcagcatgtattagcaacgctggatcaggtgtttcttactcagagtgctgaagttgagcaggcggcggcgctgtttgccgagtgcgtcaaagccaacggcattattcacggttttggctccggccattcgtttgccgcggcggtcgagctggccggtcgtgcgggtggcctggtcaacaccaaagccatcgaccagttctatggaccaaccggctggtttgattcgctcaaagggattggcgatatcttttccggactgctggatctgcgcgaggcagactgctttgtgattatctccaactccggcaccaagccgctgcacgttgagctggcacgcaaggttaaagagatgggactgaagctggttgttatcacccgctacaccggagagtcggtatcagcgagcgagagcatttgcgactatgccgacgtcattctcgataacggctgtccggccggtgactgcacgctgagtatggataacggcaacatcatgaccggcccggtgtcctcgctttctgcggccttcatcatcaataacgtagtaatccgctgcatcgagatgctgctggaacagggtatcgcgccgccggtgatgcgcagcatcaatctggccggtggcaaagaatacaacgatgcgctgatgactcagtacaaagagcgcgtgtttacgctgtaggggaaaaacatgaaagagactctgtctaatcgccttgcaccgctgccctttcctgctatcactcccgacgactgtcgggatgcgctggcggcatgtgtgcagcgcatcacgcgcaacatgggcctgtatggcgagaaattcccctccgcctgcactcacaacaatcgctatgtcctgaaagagaataacgactggaccaatggtttttggaccgggatgcaggccatggcctgggagttcagcggcgatacggcatacctggacggcgttgaacgtaacgtcgccagttttaaagcgcgcctggtgacacaccatgtccttgaccatcacgatatcggcttcctttatagcctgtcggcggtcgcgcactggaaactgacggagcgcgacgagttaaccccgcttatcgtggcggcggccgatctgctggcgaatcgttttcacgacagcgccggttttatccaggcctggggaacgcttaatgacccgcaggagtaccggcttattatcgattcactgattaaccttcctctgctccacgtggcggcgaagatcagcggtgagtcgcgttatagaatcgttgctgaacgtcactatgcggcggttatcaaaaacatttttcgcgcagatggctctactttccataccttctattttgacccgaaaagcggtgcgccttcacacgggaaaaccttccaggggtacagcgataactcctgttgggcgcgcggacaggcgtgggccattctcgggatcccacttcactggtctgccaccggggaaaccgactactacgagcgctggcagcaggcctgcgagtacttcttccgctacctgccggaggacggtgttccggcctgggatctgctgcttgccactgatccggcggcgccaaaagacagctccgcgctggccattgccgtgtgcggcctgctcgaagcgcacaagcacttcccggaggccgggtacgagaaactggcgcgtcagcttctgcaggcattaatgcgcggcgcttctgcccgcgatgacgacgcctgcgaaggcttacttaaacacggtgtttacgcctatgcccttggcaaaggcatcgatgaatgtaatctctgggggattacttctacatggaagcgttatatcgaatctaccaaccgcaatggtcaggatactggttatgacaatgattcaaagttatttaaatatcgtccagaagaaacttaacgacattacccaacagcaaagccataaaatcacctccgccgccgggcaactggcaaaggtcattaatcagggtggtgtggtttatattttcggctgtggtcactcacatattttcgctgaagatatgttttatcgcgccggcggtatcgccccagtccggccgatatttatcgagcctttaatgctacatgaaggtgcggcagcttcatcctattatgaaaagcaaaatgattatatcgccgggcatctggagaagttcgcgataaccaataaagatgcattaattgttatttcaacttccgggatcaaccccgcgccggtggatgcggcattgtgggcaagacagcacggggcattgactttggcgctgaccagtttcctgtatgccgagacccagccgtcgaagcacaaggctggcctcaaactgcgcgactgcgcagatatcgcgatagataaccaggtgcccatcggtgatgcggtgctgtcgcttgcggatcatgccacgccgtttgcgccagtctcctcgatgaccgggctctttattatgcactgcctgtttgcagaaatcatcgcaaagctggggcgtgataataaatgtctaccggtgtttttgagcggtaatattgctaattcggcgcaacataatgaatatctcctggaaaaatatggcccccagatcccggagctgataaataacaataattttaaataagtagtacatcccctcgccctacaatacagggttttataaggtatataataatgacaagtcataaactcagagtttctctgtgtgcatcgctgttgctttttattgccccaaatgcctttgcggaagaagaaacggattatgaagcgccttcgcagtttgagaaagcgttttatgatgaaggcaaattaaatttcaatacctcgttatacattcgtcatcgtgcagtcaaagatcctactaccggtaaatacggactgggtccggccgggatccagaaccagaccggtaacgtggcgattagctatatttctggctattacaaagatgtcattggctttgatttctggggcaacgccaatatcaaactcgggcatactgtcggtcagtcggagatcctttactacgactacgaatgtggccagccaggcaagttcagcccgtgcgagaagtcctacatgagcgtgtcggttgccgcactaaagctcaatcttggcgatgcaggtaccaacttcaagctggcggcgggttatacccccatcaactccggtaccgttaaaagcagttggggtctcaacccccacgctttccgcgggttcgacagtgccctgaccctcgataaactgcggctaacctacgcctgggccgaccgtttcaagaacgactggagccgtgattttaaaccgatgactacggcctggcaccagaacaacgccgccgggcttgatgacaacggcaaaattattaaagccggagaaataatcgattacattcacacggtgggtgcggtctataacttcggaagtaccgttctcgacgttggttacggcgaaggtaaaggctatcgtcgcaactggcaggcgctggtcgaacggaacgatactttgaccaatgctttctccctgcaaagtaagctcttctatcagggcgcgcgctacatcgaagatctgtcgaagattaaagatccatcaacggaatactatgttgggataggttttaacctgagtcacaacaataccgtgtggtcgctcggctacagtcagaactatgcgcccaacaccggggattacaacttccgcttaaccccgtgggcgaactccgataagcgtgattatcagccaacgctgtcacagctggaagactttaacgtttccggtgcccatgctgttcgttttggcgtgagttataacttcgcagattttaatctaccggagctaaccctgggaggggccggaacctacggctggcatgtggtgagcgatgtcagcaaaaccggttcagtgagaaagtacgacggtagtatggtgtctttcgatctatccgctcgctactcggtagccgagggtatggcgaaaggcctctccttcaccctgctccctgcactgttcaggtcgacggacagcaactataaaaccgatcgtaacgacgtgaagtttatcgtcggctacagcttcaatatcttctaagccgtgccccctcaataaaacacgaggggcgcacataggttcataatatttgttctagtgcacaggttgcaacgagaaccggttcgatgcgttcatgattgcaggtcatttaatttatggagataacaacatgcagactgaacctgaagtattaatcgaccataccgacgtgattcgcttcaccagcattgaacgtatcatcaccgggcgtaacactgcaccggcacagattgaaacgctcattcagcaacttgccgatatctcggcactgacccgcagtatcaggggaaaacggtcctcgaccaggctatgactcaggacttccaccgtagctgctagctgatagagaaaccagaagccgccatgaaagccattatccgtaatcttgaaagcagtatatggcgtgattcaatgaagaagtccggtatgctgagtctgatagatgttcaggcgcatgaccagtggtattgtccgacgaattctcaagctcaccatcacagccagacagttatggcataccagatggtaacttaataccgataaaaaagaaaaagccccgagctaataattagctcagggcttatatttggcggaagcgtagagattcgaactctagaaccctttcgggtcgccggttttcaagaccggtgccttcaaccgctcggccacgcttccggtatggggcgcactataaacacctctgccgatgctgtaaagcatcattttgttcaactgccttaaaaacaaacaaatctgtgttattcgtctgaatttcaggcagtttgcacagaaattcggcgttaagagcgccctttgactcaatgttttatgatgtacatatctttggtgtagtaatagcccagcttatccggctcgaacccaccgacccacggcttcactaaatgggtacgcacatagtgataaaccgggattgcgggcacatcctcagccaacagatcttccgcctgctgatagaatttgccacgcgcggcagtatccgccgccttcgccgcatcatgcagcgctttatcataggccgggttgctgtactggctggtgttttcgctgtcgccggtgcggaagttattcaggaatgacgccgcatcgtcataatcggcgatccaggcgtaacgcacggcatcaaaattatgcgtatgcatggtatccagcatcgtcttccactcctggttctgcagctttgcctctacgccaagatttttcttccacatcgaactggcggcgatggcaatgcgctggtgcgtctccgaggtgttatacagcagattaaagaccagcggatggctttcattaaagcccgcctcgttaagcaatttttttgcctcagcaatgcgtttgtcgcgcggccagctggcgtaatccggttgtttcagcgtgacgccgccgatatcgggctggctaattagccatgccggacgctgtccctgccccatcaccttatcggcgatgatatctttatccagccccatgttgagcgcccggcgcactcgggggtcattaaagggcggtttagtggtattgagttcgtaatagtaggtcgccagctgtggcgcaacgttcagctgcgagcccatcgttttcttgagtaacgcaaactggttcaccggtaccgtataaacaatatctatctcaccggctttataacgattcacatccgccgcttcggaagtaatcggcagataggtcactttattgattaccgtatgttcattatcccagtacttaggattgcgttgcgccacgatgcgctcgttgacgacccacttcgaaagcgtataagggccgctggtgacaatatgttccggtttagtccatttgtccccaaaacgctccaccagcaccttatcaataggcaccagcgacgggtgagcaagcatcgcgaggaaggcggcgttaggctgattcaacgtgacctgcagcgtggtatcgtccagcgcttttacgccgagagtttccggcggctgtttcccctccgagatatcgcgagcgttagcgatatgcatattgcccggatagctggcgtacggtgaagcggtggtcggcgtgaccagccgctgccagctccagacgatatcctgtgcggtaattgctgtaccatcggaccaggtgatgccagggcgcagatggaaagtccagacgaggttatctttattctcccacttcagcgccagccgcggctgaatctcaccctgcggcgaaacgctcaccaacccttcgaacagatcgctgatgatattaaactcgacgtcactttcgaccttatgcgggtcgagcgaagcgggttcattaccgttgttcctgacgagctcctgttttgctgcaagttcggtaccctgcgggacctgggcggccattgccgtggccgtgctgccaagtaaacccaaaaccagtaatgcgtgtgtgatgtggttatattgttgtcgtttcatttcccttgcctttatgcttcgttgataccccttccacacttagtcgctgactggcattaaggcaatatttttcagtgacctataagattcagatctgctttccgccgctgaacgcataaacatactgtcttaatctattttaccagaataaaacgctaccccaccggcagcgggatctgagtaaagatgggtaaaagcattatggctttcggctcgcttttcttatgcttcataactaattacatctgtcataagagagtgactcatggatcgtataattacctcatcgcgtgagcgttcatcgctgctcagcacgcacaaagttctgcgtaacacctattttctgctcagcctgacgctggcgttttcggcgatcaccgccaccgccagcaccgtgctgatgctgccgtctccggggcttatcctcaccctggtgggcatgtatggtctgatgttcctgacctacaaactggctaataaaccaagcggtattctggcggccttcgcctttaccggcttcctcggctacatcctgggaccaatgctgaacgcttacctgtccgcaggcatgggcgatttgatcggtctggcgctgggcggtaccgcactggtcttcttctgctgctcggcttacgtattgacgacgcgcaaagacatgtccttcctcggcggcatgctgatggcgggcgtggtggtcgttctgattggtatggtggcgaacatcttcctgcagctgccggctctgcacctggccatcagcgcggtgttcatccttatttcttccggcgcgattttgtttgaaaccagcaacatcatccgcggcggcgagaccaactacattcgcgccaccgttagcctgtatgtttcgctgtacaacatcttcgtcagcctgctgagcatcctcggcttcgccagcagagactaaccttctctcctgcaacaccaggcctcgcttatgcggggccttattttttgctacactgcgcgcagtttccgcattatgtgaaaaatcatgtttatctttgaaggcagtgaaatagagaccgatagcgaaggctatctgaaagagacgacacagtggagtgaagcgatggcggaggttatcgccgctcaggaagggatcagcctgtccgtcgaacactgggaagtagtgcgcttcgtgcgcgatttttatctggagttcaacacttcgccagccatccgtatgctggtcaaagcaatggcgaataaattcggtgaagagaaaggcaacagccgctatctgtaccggttattccccaaagggccggccaagcaggcgacgaaaatcgccggcctgccgaagcctgtaaagtgcatttaatagagaatagcgaatttttgccactctctggtgggttgatggggctcggttaacaccctgtcaacccttgcgctacgcggcccgccggccttaagccaggcaataagtttttccacctgctccgcttcccgcaggccagcacttccacgctaccatcatccagatttcgcgcataacctgtaagccccagatgcagcgcttcacgctgcgttgaatagcggaatcccacgccctggacgactccgtgtatccacgccatcgtgcataccttcgccattattacctcctcaactgcgctatcctgatgcagagaatagcaaattctcgccagcatactcatttttgcctgacgctaaaacatcgccccggcggcggcaggaatggtgcttgccccagccagttatgctaatctacgcgccatttttcggtgccgacgctccgtcgcttaaaggtagccccatgacagattccattattccccgcttagtattagccaaaggacgcgagaaatccctgctgcgtcgccatccatggattttctccggcgctgtcgcccggatggaaggtaaagctcgttccggcgagacgattgatatcgttgattcacaggggaaatggctcgctcgcggcgcctattcgccctcctcgcagatccgcgcccgcgtctggagtttcgatcgtcatgaagctatcgataatgcttttttcgagcgtcgcctgcagcaggcgcaaacctggcgtcactggctggcggaacgcgatggtcttgacagctatcgtttaatcgccggggaatccgacggcctgccaggcgtgacaatcgatcgctttggcgatttcttcgtcctgcagctgttgagcgccggcgcggaatatcagcgtgcggccatcgtcagcgctctgcagaccctgttcccgcaatgctcgatctacgatcgcagcgatgtggcggtacgtaaaaaagaaggattggacctggcgcaaggcccggtggtaggcgaactgccgccagcgctactgcccattaccgaacacggtatgcagctgctggtagatattcagggcggccataaaaccggctactatctcgatcagcgcgatagccgtctggcgacccgccgctacgtcgccgataagcgcgtcctcaactgcttctcttataccggcggattcgcggtttctgcgctgatgggcggctgccgccaggtcaccagcgttgatacctcacaagaggcgctggatgtcgccagacagaacgttgagctcaataagctggatctgtcgaaagccgaattcatacgcgatgacgtgttcaaactgctgcgtaaatatcgcgatcagggggaaaaattcgatgtcatcgtcatggatccgccgaaattcgtcgaaaacaaaagccaactgatgggtgcctgccgcggttataaagacattaatatgctggcgatccagctgttaaaccctggtggcatactgctgactttctcctgttccggcctgatgaccaccgatttatttcagaaaatcatcgccgacgccgcaatagatgccgggcgtgatgtacaatttatagagcagttccgtcaggctgccgatcacccggtgatcgcaacctacccggaaggactgtatctgaaagggtttgcctgtcgcgtcatgtaacttgaaaagcggaacatcgcccacacgttattctcatgactcaagaacatttgaagatgatggatacagtgggcgccagcgtttcccgggaggtgactatgattgtcagcaaattcggtatcggccaacaggttcgccatacgctactcggctaccttggcgtaatcgttgatatcgatccagagtattcgcttgacgagcccgccgcggatgaaatcggcgctaacgatgaactgcgcgcggcccctggtatcatgttgtgatggaagatgaggacggccagcctgttcacacctacctcgcggaagcgcagctcagcagtgaagccagcgatgaacatcccgaacagccgtcgatggacgaactggcgcagactatccgtaagcagctgcaggcgccgcgtctgcgtaactaagccctccgtgccgccccgatgggcggcttttttccacgatcgctcttaatgctcaacctctgcgtcagctaaagcctgacaaatcgcgccgttaaactgcgggcctgttgttgagcttctgaccaacgagtattagcgacattcagctgtcttgactgcgcagcgctattgcgggacagttgattaaagaaaggctgtagcattcctccccggcaacgtcctgcgcaatcaacaccgtagaaccatcgctgtagcgaaaacgctgagcagcggcaggcagcgctacgctggcaaatcgcgccgccgcgacgcttgcccagtagttggccgcagagtagccgcgcgagaagttactttcacaggccggtaacacggccagacgacgggtatttttctctggcgctttaaaactattttccatccagcgcgccattccttccagataccatcgttgtttaaacaccgcgtaaccatattgataaagatggaaaaactcatgagccggggtgacgttacgggctggatctagcgcagcattcagcacaaacttcaggccgcaaggtatctgcctgccatcgcccatcttttctgaagcgacgcggtcgaaggcaaggccgttaccttttggcaaagtcagcacataaatgttgatttgccgcgcctgtgcgtaaattttctgctgtagcggaaagcgtaatcccaataccgtggagtagagatatttagcggcctgtagctgaacggcaatatccttaatgctgtcgggaacaccgctacccgaactgtcgtactgaaatttaagggcatcaggcccctgcaggctataaaaaatgtggaactcatcttcgacatattctttttcaagaacatgcttaagtagtatcgaacctttaacacagcgcgatacctgcaccatttcttctgcggaggctgaagggagacaagacatcgccaaccaacacgctgctattgatgtcgcccatgattttactggttgcatagcgccgcctcccccgacatgctccgccccgacatcatatgctcgccggggcggcagtcgtcttacactacccgttctttgagagaaatcacgttcggcccctgttggccctcagcgcttatccgctgttcattctgctgcaaccactgctcccagcgttgggcaatcgcattggcgcaataacgtcgcgcgttacgcagggcggcagcctgcatctctttttgtagcgccttgtcagaaataacctgtaccaacgccaccgccagcgcatcttcatcaccgtatggcaccaggatcccggcctgtcgatcctgcagaatatcgcgcgggccatattttatcgcaaagctgatgagcggtgtgccgtacgccatcgcctcaacggctgacaaggattgcccttcctgatttgagcacaataccgtgcagcaggcggatttatgtactgtggcaatatctgaggtaaagccattaatggagatgatgtcctccattttccacgcttttatctgatcgctgagagtacggcgtaacggcccaacgccataggtatgcagtcgcgcaccaggaagctgcgccgctaccttgcgaaaggcgttaaacaacatcatgtgctgcttctcttccgagtaacgcgccaggtagataacggtttcagagggatccttttgcgggtttgccggaattttgctgtcatccatatgattagggatgacggtcagacgttcgccgggaaatccttcatgctgtatgtcctgccactgctcatcggtgagaacgattaagcggtcaaccagttccggttgctcgattaagtggcggtaggaggctttcactacgccattaagcagctgatgatgggagtggataatcgcgctcagcgtgcagtctatccgctgtgccggacgagaacagacaaacgctttccaggctttatttttatcgacgataaaatgccagcggcgctcgtcgggcagcatcatctccagcatccacgagaagaacgcctcctgctggttgaaggatttaacgtcgccgtcaggcaaggcaacatcgatacgggcaatttgcaaattcgcttttctttcgtcgaaatatttgcgcagcagaacattgccggcgccatcgacataatcctccaccagctgtccctgcgggcgtagctgatagttatttttgccgaccgaggcctgggccttcggcgcgatagcctgtcggagctcaacctcacctttaagcgcaggcagcgggataattttccccgctgcgaagctcgtcactaaagcctcgtagaggttataaaccggcacctcttccggcaacgcgccgcgcgcctttaacgccttgaccgcgacatgcagttccggatcccacattgcggtgataagccagggcacagtctgcaggtgctcgacgaacagcttcgcacgccgggtggcggcgacttcaataccgttgccaacatcacgcaggttctctaacaaaaataccgttgtccccggcgctcgggaggcgcaaccgcaggaattgactggcgcatagtcgccgcctgataatatttttgataggcaatatagccagacagatagtgctcaacgtcatcaatacgcacgcggtagctgtggtggcgaataaagaagctgttgacgatacgcgccggttttttaaagaacatcgccagttccggccagaagaaaccatccagcaggtagcgcgcacgacattccaacgcctgatagaacttttctttatcaaacccttcaagtaaatgacgttgcgccggcgaagcgtcaaggcgcgcaatcatctctgctgccgccatcatcagctccagcagcgtcggataggttgtcacgcgctgcagtacgaaatccagatgtccacgcacgttatccagcccaaagcgaaaataacgttcttccggacgaaaacgcgtcaattcgttaacacagtaactcagccagtggtcgtgatgctgccagtgctgttgccgaatgaagtattcgaacgctttttcaaccatcgccagccactgtggcatttgcgtcaggctatacaaacgcatcaacgcgaacgccgcctcgccatcgtagtagataatacgatgcttagccttcaacgagaggtcgtgactattgagaacatggacaaactcgccgctctgcgcatcctgcataaatgcaatgccggcggccagttgcgccattaattccaggtgctgctggtcgcctgtcgtttccgtgtatttgaccagcgccagaatactcaccgcattgccgccgagtttaatttcattatcgacatcacacaaaaatgccgcctgttgcccatcgtcaagggtacgcacagaaataagattggtaaccaggtaaccaatcgctcgatcgatcgcctggcgcaggtgcggttgcctggttgcttcccatgcttcaattaacgaataggtcgaactggcatgacgcaaggcgttataggatcgtacaggacgatcgaaacagggaaaccaaccgtagtaataaagtccatcttttttcacctgacgagctaagtaatcgctaccttttttgatcacttccgccagccagtttttttgccattcttcgccgataacgcggtagcctgaactgcggccgctgtgctcaatcagcctggcgccgctgcggtcgcagaataccgcgcgggttttgaaacgccaaagtatctgctgtggtgcatccggccagctcaaactttgtttaaagcgtcgttggccatagttttccagattgatgccatttggcgccgcgacaccgttatctccgtcatacaataaggcattcgccgcaatttcctgttcgaggatcgcctgagtaaattgcgcatcgaaagagaggccaaagcggaaataattgcgtttggtgatgctgagtttcttctgtagattttcccagctgagtttttcaacgctatcgacaatatcaatacgcaaccactgtggttcgttgtcttgttttttgcgccactcctgcagggctctggcgccagcaagccaggcttgatcaaaactggccgccgctgcgacctggacatgcgcccgctccttaccatcactcacgctaaaaaagataacccacccgggataatcagcaggcagcgcggtcgtttttaatggtctgctctgaaagcaggcctgttgtaataaatcgcttaatgccatctcaaatctccatacgttgaaaatttcaccaaacatgaagccaacttgtgggtattacctttctctcagcgcctcttttgctcgattaaatggtttcaccagataatccattaccgtcttttcgccggttttaatatcaacagtggcgatcattcccggaccgattaaaaaacgcttaccgtgtttattttccagatagttatgatcggtacggataaacacccgatagtaataaagatcgggttttgcctcgtcctgaatagtatcgggagaaatggtctcaacgaccccattaagcgcgccgtagatggcataatcataggcggtgattttcaccagcgccttctgatcgggatgaataaaagcaatatcgcgtggcgaaatacgcgcttcaattaataagcgaccatcgatcggcacgatgtccatcagttcgccgttcggggcaataacgccgccaatggtgttgaccttgatatttttgacgatcccctgcaccggcgagcgaacggtcagccgggctacggaatccgctcgccctttaatgacttcagcaagactggctacgtcggcattggctttcgatagctgttcgcgggcatcgacgtagtagcgggtgttgagatcgattttctttaactcaatatcggcagcctgttggcgcaaacgcagcacttccacattactggcagcgccggttttagccagcctttcgttgatagccagctcgcttttcaccaacgacagcgactgctcaagctggcgcatcgatttggttagctggtcccgtcggctatgatagaggcgggtttcttccgccagtaaccccggccaggccttaagagaaggaggaaaaatcagcggttggttattaacttcggcggtaaggcgaatgctcgctgccagtgaagcgcgatatttcgcctggctctcgccgacgttcgattcgctacgagtaggatcaagccgcgcgacgacctgcccggccgccaccctgctcccctcgcggacgttgagctcggttaagatcccgccatcaagggtttgtagcacctgctcacgagagcttgggatcaccttacctgtcccggtcgaaacctcgtccagggtcgcaaaccacgcccatacgccggtcactaccattagcagagccagcaggagaattaagcggcgcgatttgaccagttcggcctcatcccgttcattatcgaccatgtcagcaaccggatcagaatcctgcgccagtgggagaatcgcgtcggacttattcatatattcaccacctggccacgcgctttttcttgttcaaagaccgtcgctttaggtttatctaacgccagttgcccatcctggatcaccaaaatacgatcgacgatgctcagcaccgccgctttatgggtagcaataatcaacgtacgttcgccaacccaatgcgccagttgctcgacaaacgctttttcggtgcgttcatcaaagaatgaagtcggctcatccagcaaaataatattggggtcccgtagcagagagcgcgcaagcagcaatgattgccgctgcccgccggaaaggccaaggcctccttccatcaccagatgttcaagccccataggcagtttactaacgaactccatcgcactgcatagttccagtaccttcaccagctcgtcatcgctggccatcggccttcccagcgttaaattttcccgtagcgttccgtggaacaggcgagcttcctgggtcagcaaagtcgcattacggcgaatatccgccagatcgatttgcggcagggcaagatcgtcgagccgcaactcaccggacgccagttcaacgtttcccatcatcgcctgcaatagcgtcgatttaccggcgccgatgcgtccgaggatagcgattttctccccggctttaatcgacagctgcttaatacgcagcggtaccggcccgttgtccttgccgtagcgaaactcagcgttgcgaaactcatagttgccgtgcagcacagcgcggtggatgcgcggctcatcttgcccgccttctaccggcagcgccatcagattatccaggctggctttcgccaccttcacctgctgccagcgcgccaatacgccgcagagcgcggtcattggcgccaccatccggcttgataacattgacgccgccaccattgcgccggttgtaatgtcgccattaatcaccagcggcgcgccgaccattaccaccgtggcgtacagcagattctggatagacatcccccagctcaccaggccgtgggtgactttgcgggtttttacccccgattctgcggtgatagccacatagctattccactgctgtagaaagcggctttccgcctgcatcattttgatatccggtaggccctgaatgctttccaccagaatggcgtttcgtagcatactttcgtgttgatttttgttcgccagctcggccagttttttttgcaataaaaatcccgggagcagcatcaggatcgtcgcaaccggcgcgatccaacttaaccaaggcgaaacaatgaacagtatcagttggaaaaggatgaaaaacggaagatcggcaatgaccgtcatcatggttgacgtcatcatttcccgtacctgctcgagctcgcgtatctgagaaataaaactgccagtagaacgaggaaccgctgagttttttagccgcagcgcgtgaccaaatacacgatcggaaatacgaatatctccgcgtttgccaagtaggtcggtaacatgaccacgggtaattttgagaataaagttgaatactgcagcgattaatacgccgctgaataaaacgtataaagtgggataagactgcgcggggatcacccggtcatacacctgcatcgaaaatagaatgccggccagagccagtacattaattgccagcgatgccaacatgacatgcatatacgggcggatatctttgagaacgattttgcgcagccagtccggctgaaagcgcgcaagataactttcagttcggatatctttctcgggtgaagccgggcgaaatgcaacggtaagctcaatctcagctaataatgcgtccagcggccactggctgagtaaggtgagctctttgacaaaacggatgccaactaaattattaagatcgaagctttcaataataccaatctgtccatctttaagctggacgactagcggtaagcgccacgccgacatccgccggtcgttgccgttgagaaactgacaatgcaaaccggcgtgccgacagagatgtttcagcgcatcaggcagtgttttctgcgtcgcccactccgccgccgcatgcagcgtccccggcgaatagctctgccgataatggctggcgacaaaagccatagcattagcccaatccagaagatggggaatatcgctgtgatgaggttgttcgctcatgggcggatctccacaccctggatgctttgattatccagagcaaaaacggagcgcatctttccagtactgaacagacagtccagctccagattacgcagttgcgcttcagttaacacctggctgaattgcgcctgatagatttcctgatcgacgttaagcagatccagcagcggacgcgtacccaactgcagatattgatcctgatagagcgcgcgagtttgctcgccaagttgctgctggcggcgctggatgctgatggattgtttaagattcagcgcctcatcgcgcgaggcgcttaatttctggctggcatcaagttgggcgtttcggatcccagcgttagcagcagataaaatttgctgcgctgcttcgcgggaagccgttaacgctcctccctgatagattggcatttccacttttacccacgccgaatattgcgttttatttaatacggcgctgttggcgtaattatcattgagataatgcgtcacctggggttccagagagatggtcggtagcatttgcgcggtcgcgttatcaagctgcgcctgcgcctgcgtggcttgcgctaaagcggccagcacagcgggtacggcgcgataatcaattttacttacggcgcaggccgcatccatatcctgcggcacgccgtcagtcacggaagtaatgctgccaagtccaagataggtggccagagtcgctttccagcgttcaagcgccgcctggtattggataagcgtcgcctgcgccccctcaacgcgagtgtcagtctgcacaacatcagagagcgaagttgccccagcatcgttccgctggcggatcagatcgccaatttgttttagcgaatcaacttgcgcctgagcgattttcaccagcttttggtaaccctgcatctgaaccaccgcgccagcggtatcatgggctacctggtcgatattaagcatcaccatcgcctgctgctgggcgacggcggcatctgccgctctgaccgagcttgagactttgccaaagtcatagagcatttgtgaaacagaaacaactaacgagggtgaatagccggaatcggtgtatgaattactataaccattattcatccccgcgttcacctgaggataatatttggctttagctacatccacgcgctgcacctgttcctgtagtttactcacctgctgagtaatcgccgggtgccagttgaccgctgattttaccgcggtagcaatatccaacgggccggttaaatgactctgcggattgatgagatcctcagaatatccggcgacctgttggctatcgtttaatctctgcgtactaatgttagtcggcggaaatgaaagatcttccgcataacccgttaaggtcatacttaacgacagtaaaattgtgccggacctgtaaacgctgacaatccctttttgttgaaatagacgcataaaattacccttcagaaagcatactgaaaatatggatatactcttttcgcatcattctttttatttaacgattgcccatcgtttccggggttgttttcttcgtttcacctccagcgtataaagccataatggcagcgcctccttgcgccgccagtgatatggccggattttagtgcgagttattggtatcaatcagctcgtcgagcgaattgatatggaccccttgcagcgtgattagcgtcgctggctggtgcgtcgctccacccgaaccatcgcggtcgatagacaccaccgtattaccgccgacatagctcagcgtaatatagttacccagcgtatcactggagccattccagccgaccaacagcgccgaaacatcaatttggtctccctgggcgaccgagaaatcgctccagatatcgctgccgttaccaccggtgttgtcatccgacagcaagttgtaaaccaacgtatcggcacccactcccatgctgaaggtatcatcgtaagcggtactgtgaatgctatcgtcatttacgctgccagcaatctgcggatgcaaatcgatggtcaaattcgccgtcgaactaccgccatcactactaataagcgtgtaagtaaacgtctccttagccgtaatggcatcagtattgataccgctattcagctgataggtataacctccctgcccatcaatggtcagcgttccatattcaccatacagcaccgctttcccgttagtcgcgctggttcctgtgtcgttggtcaaggttccatcagtatggaatgtccaatgcgtcacgacacccagattgttttcccccgttatcgtgaacccgctatgcaatgatccaagcgtatcctgaaccccgtctgcgccagaaccgtcgaggatattgccggccacagattgcgcggccgtcagatgcgcatcggtatgaatctcggttcccgtcacgctcgccgccaggttgtatgtcattgccggtccagcctgcatcgtatgactaatactcagagtataatcacctgcggcaagttgtaccggagtagttccattaaccaggttaagcgtcacagtgtccgtatccgttgtcgggcttatgatggggacaccatccagagccatactcaaaggcccgctccagaccgtcacatcagtcattaccccgtcaaccatcacatgatgaaccaatgtgactgtccctgagagatcgccgttcaatacagtcaagccactagtcctggtgccactcagatttagggtgatggaagcgttatccacttcccggccttcagcgacggtaaagttctggcttgtaactttagtcgtcgatgtcgtattagccgctactgctgcatttgtcaccgcaagattactgacgctttgcgtccaggtaaccgactgcattgccgttgccaccgacagggaggcgatatcatcaaccgctatcgctggcgttgactcaatgttcatcgtcagcgttgtcgacgatgtatgacccagcgtatccgttatcgtataggtgaagacatcactctgacccacaccggttgttccattagcatgataactatagctaccatcagacttgatagtcagagtaccgtatgtgccgttaatcgtgacgccgccggcagtgacggtctcgacctgcgatccaaactggatgctgcttacggtaattccgttacctgtatcgccaacatcgccatcgctatcggtatgcagaacattccccgtcacgtatttagtcgaatcagtcacctccatactaatgctagtgcccaaattcagattcaatatcgaaccaatcagtcctccagttgtcggcgacgaaataacgaccatatagttaccggcaccaattttttcgaactcaccgcccctgcgtactgcaggcttaatccaaggagcccctgcggcgttgccgaaattccatccttaatgacgccgacaatctggttggtatcggtattcaccaggataagatccagagtgaccgcgccaagcgccacgcttaaggttgttgaccccgaaacggccagggtgacatcctgttcagtcccgtcggctacggtaaatttaaagccatttgtcggtagcgcgacattcaccgtattgagtaaggaaagtccagccagttgaacgacattacctccctgtatatcaatattgtcatcgacattcccgacgtagtaagcctgggtatccggattggcctgggccgattcaacctcctggccaatattgatggtcagtgtggtggttgattgcacaccattgctgtccgtaatggtgtacgtgaatacatccgcattacctgccgaacccgccttaccagacgcctgataggtataactaccgtcagcattaattgtcagtacgccataagcccccgttactgatattgtgccgccgttgactgagtgaggttcacccgccgcagatgtcgcggtgacagtggtaactgacagacccgtaccgctatcagccatgtcgccattttcagaaccctccagcacgttgccggtgacggtgcttccgctataacccaacgaatcggttaccgttgcctcgacaaaggtggctacacccgctcccgcgagcgtattaatcaagctaaccaataccccatcagaattcggtgaggaaatcgccaacgcatagtttcctgccggtaagttctcgaaggatgccgtaccgctataaaccagcccgccaagtaatgtcgcgctgatattcacacttccagggtcaattgcgaccactcgtccagttgcgacatcaatcaccgagaggtcggccgtcaacgtatttccagcccccaacagattgactatcgaagttagcagtccgccggttgaaagcagtgacacgccgctgacatcaacagtcatattttctgtcgtgttgttatccacgttgaagcggaaactactgccagacagcagtgacacattaatcgtgcttaacagcgagacgccaaccaactgcgacagattaccttcggtgccattaaggttgccgtaatgctgaacaacctcagaactgttggtatcaggtattgcctcaacagagtcggagtcgctgtcggaatccgaatcactgtcagaatcggagtcgctgtcagagtcggagtcgctgtcggaatccgagtcactgtcagaatccgagtcactgtcagaatccgaatcgctgtcagaatccgagtcgctgtcggaatccgagtcgctgtcggaatccgaatcgctgtccgagtcggaatcgctgtcggaatccgagtcgctgtcggaatccgagtcactgtcagagtccgaatcgctgtcagaatccgaatcactgtcagaatccgaatcactgtcagaatcggagtcgctgtcagaatccgaatcgctgtcagaatccgaatcgctgtcagagtccgagtcgctgtcgctatccgaatcactgtcagaatcggagtcactgtcagaatccgaatcgctgtcagagtccgagtcgctgtcgctatccgaatcgctgtcggagtccgaatcactgtcagaatcggagtcactgtcagaatccgaatcgctgtcagagtccgagtcgctgtcgctatccgaatcgctgtcggagtccgaatcactgtcagaatcggagtcactgtcggagtcggagtcgctgtcggagtccgagtcgctgtcagaatccgagtcgctgtcggagtcggaatcgctgtccgaatccgagtcgctgtccgaatccgagtcgctgtcggagtcggaatcgctgtccgaatccgagtcgctgtccgaatccgagtcgctgtcggaatcggaatcactgtcagagtccgagtcgctgtcagagtccgagtcgctgtcagagtccgagtcgctgtcagagtccgagtcgctgtcggagtccgagtcgctgtccgaatccgagtcgctgtccgaatccgagtcgctgtcggaatctgcatcagcatcagattctccgatatcacttcctgccacgatattaattgtcaacgtggccgtcgcagtatgaccattcgcatccacaatcgtgtaggtaaagacatccgcctgcccaacagcgtctgcatcccctgttgctttgtaggtataactgccgtccgcatggatcgttagttgtccgtagagaccattgatcacgatacctgctgccgtgacatcgagcggtgtggtctgcacgctggaggcaattttgcttaccgtaataccctcaccggtatccgctacatcgccgcccgcatctgcagtcagaacattgccggcaatagcagtcgaggtgtattccgtagaatccgtgatcgttgcttgcgctaccgacaacagatttgccgacgccagttcatcaaccactgcggccaggccacctgatgcctgcggtgaagaaatcaccaccgcataattccctgccggcaagtcgctgaaggtcgcactgccggagtaaaccaggttcagtaacgccagcgacggtgtcatgctcacggcatccgggataatctgcaccacctccccggtgtcggtattcacaatcgacagatcggcggtaatggatgatgcgcctcccaccagttgccccagcagcgccagtacagactgcaaactcagcaatgttgaaccggtgacagcaatcgtcacatcttcggtcgttccttcactgaccgagaattttgtcgagttcgctgccagcagcgagacatcaaccgtattgagcaaggtgacgcccaacagctggctcgctgtgccggtcacgttattcagattaccgtctacggtatcgatagctgccgtatgcgtatcatcatttgcctgcggttcggaatctgagtcgctgtcagaatccgaatcgctgtccgaatcggagtcgctgtccgaatccgagtcgctgtccgaatccgagtcactgtccgaatcggaatcgctgtcggagtcggagtcactgtcagagtccgagtcgctgtcggagtcagaatcgctgtccgaatccgagtcactgtcagaatccgagtcgctgtccgagtcggagtcgctgtcggaatccgagtcgctgtcagagtcggagtcactgtcggagtcggaatcactgtcggaatccgaatcactgtcagaatccgagtcgctgtcagagtccgaatcgctgtcggagtcagagtcggagtcgctgtcagaatcagaatcgctgtccgagtcggagtcactgtccgaatccgaatcactgtcggaatcggagtcgctgtcggaatccgagtcgctgtcggaatcggagtcgctgtcagagtccgagtcgctgtccgagtccgaatcgctgtcggagtcagagtcggagtcgctgtcagaatccgaatcgctgtccgagtcggagtcactgtcggaatccgaatcgctgtcggagtcggaatcgctgtccgaatccgaatcactgtcggaatcggagtcgctgtcagagtccgagtcgctgtccgagtcggagtcactgtcggaatccgaatcgctgtccgagtcggagtcactgtcggaatccgaatcgctgtccgagtcggagtcgctgtccgaatccgagtcgctgtcagaatccgagtcgctgtcagaatccgagtcgctgtcagaatccgaatcgctgtcagaatccgagtcactgtcagaatccgagtcgctgtcagaatccgagtcgctgtccgagtcggagtcgctgtcggaatccgagtcactgtcagaatccgagtcgctgtccgagtcggagtcgctgtcggaatccgagtcgctgtcgctatccgaatcgctgtcggagtcggaatcgctgtccgaatccgaatcactgtcggaatcggagtcgctgtcagagtccgagtcgctgtcggagtcggagtcactgtcggaatccgaatcactgtcagaatccgaatcgctgtcggaatccgaatcgctgtccgagtcggaatcgctgtcggaatccgaatcgctgtccgagtcggagtcactgtcggaatccgaatcgctgtccgagtcggagtcactgtcggaatccgaatcgctgtcagaatccgagtcgctgtcgctatccgaatcgctgtcagagtccgaatcgctgtcggagtcagagtcggagtcgctgtccgaatccgagtcactgtcagaatccgagtcactgtcagaatccgagtcgctgtcagaatccgagtcactgtccgaatcggaatcgctgtcggagtcggagtcactgtcagagtccgagtcgctgtccgagtcggagtcgctgtcggaatccgaatcgctgtccgagtcggagtcgctgtccgagtcggagtcactgtcggaatccgagtcactgtccgagtcggagtcactgtcggaatcggagtcgctgtccgaatccgagtcgctgtcagagtcggagtcgctgtccgagtcagaatcgctgtcggaatcggaatcgctgtcggaatcggagtcactgtcggaatccgaatcgctgtcagagtcggaatcgctgtcagaatccgaatcgctgtccgagtcggagtcactgtcggaatccgaatcgctgtcggaatccgagtcgctgtccgagtcagagtcggagtcgctgtcagaatccgagtcgctgtcagagtcggagtcgctgtccgagtcagaatcgctgtcagagtccgagtcgctgtcagaatccgaatcgctgtcagagtcggagtcactgtcggaatccgagtcgctgtccgagtcggagtcactgtcggaatccgagtcactgtcagagtcggaatcactgtcggaatccgaatcgctgtcagagtcagagtcactgtcggaatccgagtcactgtcagagtcggaatcactgtcggaatccgaatcgctgtcagagtcggagtcactgtcggaatccgagtcgctgtccgagtcggaatcactgtcggaatccgaatcgctgtcagaatccgaatcgctgtccgagtcggagtcactgtcggaatccgagtcgctgtccgagtcggagtcactgtcagaatccgagtcgctgtcagagtcggagtcgctgtccgagtcagaatcgctgtcggaatcggagtcgctgtcagagtcggagtcgctgtcggaatcggaatcgctgtccgagtcagagtcggagtcgctgtcagaatccgagtcgctgtccgaatcgctgtcggaatccgaatcgctgtcggaatcggagtcactgtcggaatccgaatcgctgtccgagtcggaatcgctgtcagaatccgaatcgctgtccgagtcggagtcactgtcggaatccgaatcgctgtcggaatccgagtcgctgtcggaatccgagtcgctgtccgagtcggagtcgctgtcagagtccgaatcactgtcggaatccgagtcgctgtcagagtccgagtcgctgtcggagtcggaatcgctgtcagagtcggagtcgctgtccgagtcggagtcgctgtcagagtccgaatcactgtcggaatccgagtcgctgtcagagtccgagtcgctgtcagagtccgaatcactgtcggaatccgagtcgctgtcagagtccgagtcgctgtcggagtcggagtcgctgtcagagtccgaatcactgtcggaatccgaatcgctgtcggaatccgagtcgctgtcgctatccgagtcgctgtcagagtcggaatcgctgtcggagtcggaatcgctgtcagaatccgagtcgctgtcggaatccgaatcactgtcggaatccgagtcgctgtccgagtcggagtcgctgtcggaatccgagtcgctgtcagagtcagagtcggagtcgctgtccgagtcagaatcgctgtcggaatcggagtcgctgtcagagtcggagtcgctgtcggaatcggaatcgctgtccgagtcagagtcggagtcgctgtcagaatccgagtcgctgtcagagtccgaatcgctgtcggagtcagagtcggagtcgctgtcagaatccgaatcactgtcggaatccgaatcactgtccgagtcggagtcgctgtcggaatccgagtcgctgtccgagtcggaatcactgtcggaatcggagtcgctgtcggaatccgaatcactgtcggaatccgagtcgctgtcagagtccgaatcgctgtcggagtcagagtcggagtcgctgtccgaatccgagtcgctgtccgagtctgagtcactgtcggagtcggaatcggaatcgctgtccgagtcagagtcggagtcggagtcgctgtcagaatccgagtcgctgtcggaatccgaatcgctgtcggaatcggagtcaccgtcggaatccgaatcgctgtcagagtcggaatcgctgtcagaatcggagtcactgtcggaatccgaatcgctgtcagagtcggaatcgctgtcagaatccgaatcgctgtcagagtcggagtcactgtcggaatccgaatcgctgtcggaatccgagtcgctgtcggaatccgagtcgctgtccgagtcggagtcgctgtcagagtccgaatcactgtcggaatccgagtcgctgtccgagtcggagtcgctgtcagagtccgaatcactgtcggaatccgagtcgctgtccgagtcggagtcgctgtcagagtccgaatcactgtcggaatccgaatcgctgtcggaatccgagtcgctgtcagaatcggagtcgctgtcagaatccgagtcgctgtcagaatcggagtcgctgtccgagtcggagtcactgtcggaatccgaatcgctgtcagaatccgagtcgctgtccgagtcggagtcgctgtcggaatccgagtcgctgtcagagtcggagtcactgtcggaatccgagtcgctgtccgaatccgagtcgctgtcagagtcggagtcgctgtcggaatccgaatcactgtcggaatcggagtcgctgtcagagtccgagtcgctgtcggagtcggaatcgctgtcagaatccgagtcgctgtcggagtcggaatcactgtcggaatccgagtcgctgtcggagtcggaatcgctgtcagaatccgagtcactgtccgaatcggaatcgctgtcggagtcggagtcggaatcgctgtccgaatccgaatcactgtcggaatcggagtcgctgtcagagtccgagtcgctgtcggagtcggaatcgctgtcagaatccgagtcgctgtcggagtcggaatcactgtcggaatccgagtcgctgtccgagtcggagtcactgtcggagtcggaatcgctgtcagaatccgagtcactgtccgaatcggaatcgctgtcagagtcggagtcactgtcggaatccgaatcgctgtccgagtcggagtcactgtcagagtcggagtcgctgtcggaatcggaatcgctgtccgagtcagagtcactgtcagagtcggagtcgctgtcggaatcggaatcgctgtccgagtcagagtcggagtcgctgtcagaatccgagtcactgtcagaatccgaatcgctgtcagagtcggaatcactgtcagaatccgaatcgctgtcagagtcggaatcactgtcggaatccgaatcgctgtcagaatccgagtcgctgtcagagtcggaatcgctgtcggagtcggaatcgctgtcagaatcggagtcactgtcggaatccgagtcgctgtcagagtcggagtcactgtcagagtcggagtcactgtcggaatcggagtcgctgtcggaatccgaatcgctgtcagagtcggagtcactgtcggagtcggaatcactgtcagagtccgaatcactgtcggaatcggagtcactgtcggaatccgaatcgctgtccgagtcggaatcgctgtccgaatccgaatcactgtcggaatcggagtcgctgtcagagtccgagtcgctgtcggagtcggaatcgctgtcagaatccgagtcactgtccgaatcggaatcgctgtcagagtcggagtcactgtcggaatccgaatcgctgtccgagtcggagtcgctgtcagaatcagaatcgctgtccgagtcggagtcactgtccgaatccgaatcactgtcggaatcggagtcgctgtcagaatccgagtcgctgtcggaatccgaatcgctgtcagagtcggagtcgctgtcggaatccgagtcgctgtccgagtcagagtcggagtcgctgtccgagtcagaatcgctgtcggaatcggagtcgctgtcagagtcggagtcgctgtcggagtcggaatcgctgtcggaatccgaatcgctgtcggaatccgaatcgctgtcggaatcggagtcactgtcggaatccgaatcgctgtcggaatcggagtcactgtcggaatccgagtcgctgtcggaatcggagtcgctgtcagagtcggagtcgctgtcggagtcggaatcgctgtcggaatccgaatcgctgtcggaatccgaatcgctgtcggaatcggagtcactgtcggaatccgaatcgctgtcggaatcggagtcactgtcggaatccgagtcgctgtccgagtcggagtcgctgtcagagtccgaatcactgtcggaatccgagtcgctgtcggagtcggaatcgctgtcagagtccgcatccgcatcactttcatggccgccaagatcggagtcactatccgagtccgagtcactgtcggcgtcagagtcagtatcatcgtttggagaatgcgacgaatgatctttatcggaagatcccgcaatcattgccccacaccgagcaaagccgcacccgccattacccatggcgcgatactgccgccagagcttcctgcggctagaagtcctgaaatatcactaatgagagaataatgcgcatcgctggttccagccccttcaagccaccacaatgcgccagtgtcatcatcctgtagcactaaatcactatgatgcccattagcatcattaacaaaaaagttttttagcgtaagggtgctaccgtcatttattttcagaacaagatcattaccttgcctcgcgtaggaactaatatcctctcgcttaatatgtaataccaccactgactgcgtgtttaagttaacttgattgccatcaacggtgtatttaacacctgtatcttttgctgtcacatttatatttttcatcaggaagcacccttgagatgaagacgcagtcagagttttgggataattcttaattatacatcttattagatataccagaacctacggcctcgcaaggatgttacaaaataaaaatgaaacatactgaaacagtcacaacgtcatgattaaattaataaaacaataaaaaaacatattttgacatgagattatttttcatgccagctttccagctcataaccgaaatctatggtaataaaaattatagttcccggttccttcatttctttttgtatcaagttcgcgtcaaatcaataaaatccgtgacggatatcatctatttcaatcataaaaagctaaattatttttaattattaaaatttataaacaacacaaaataaaaaccatagcttttccgcgccaattaaaaaaacgattttcggagtgtttttttatattttttcattctattactgcccctaaaaataaataaacatcagttatattgtgggtaattgacatttattagattacaactttattgacgaaacgtttcgctcatctaaataagtaataacgtccttgtttgcaaattaagtccataacccccccacaaatgtgctgaggaatccccagtaatggctcaatcttcagtagcacgaatgaatttgaagccagaaaaatcataaagctatatagctgaagaatgcagatagagcagaatttccgcgatgaaaaagtgaacgctttgagtttgctctgagggccagccacagccattcagtaggcagaccagggtactaagcctgctagcgacactggcaatcatagtgatgtggccgttgggttatcgtgctgaaaaaaaagatttcatcttagatagatggcgaacagtctgaagtcgagaagagttatttcgtatctgaaactagcggagaatatcctgaggcattctccgctagttttaaaaaaaacagtgctgagcactgttcttaatcacctcgccagtacctatcagaatatggtactggtttattagcgctgagtttgtggggatcccttcagcgcaaatgcggggttttactttacttcgccaatccaagccgcggaatttcaatcgcaggacagcggtccataaccacatttaatcccgcttcacgcgccataaccgccgcttgttcattaataacgccgagctgcatccacaacgtcttcgccccgatggcaaccgcctcttgcgccacgccccacgccgcttcagagttgcggaacacatcaaccatatcgactttttccggtacttccgccagggtggcatagccttgttgaccgagtagcgttttacccgccaccttcggtgaaaccggaatgacgtggtagccctgttccagcagatacctcattacccgatagctcgggcgatcgggcttgtcgctggcgcctaccagcgcaatcgtccgcgtcgcggtcagaatgccggcaatatcgttctctttcatcataatcctcctgcgctttagccctagtgtaagctaatccgggtaaaccagccatccggcctaactcacagatacggcaaaatttttctccccgacgcttgcagcatcagtcacttccagtaatctgtctgcaagttaatataagtggaaccccattatggaactgacaacacgcaccttgcccgcacgtaaacatattgcgctggtagcacacgatcactgcaaagatttgctgatgaaatgggtcgaacgtcatcaggcgctgctggcacaacaccagctttacgctaccggaaccaccggtaatctggtttcacgcgccaccgggctggaagtgaaagcgatgctgagcggaccgatgggcggcgaccaacaggtgggcgcgctgatttcggaagggaaaattgatgtactgatcttcttctgggatccgctcaatgcggtgccacacgatcctgacgtcaaagcgctcctgcgtctggcgacggtttggaatattccggtagccacgaatgccgccactgctgactttattatccagtcgccggactttaatcaaccgattgaaattctaatccctgattaccaacgctaccttgccgagcgcctgaagtaatacccacggcggcctgatggccgccgatgatcagggctttcgcgctaccggcacgcccagttcctgcagaatctcaacaaatgacgaaggccgttctttattgaacaacagccagacgcgcaggcgggcgcgggttatcgccacatacagcagccgccgctcttcggcatcagggtaatcttccggctgtggcagcaacgcttgttccatcaccgactctcttgccggtgccgggaaggcgtcatccccctcctgcaggcccaacacaataacaaagtcggcctgctgacctttgctggcgtgaattgtcataaaatctagctgtagatgtggccagcgggtcgcggctttttccagcgcggcgggtttcagatgatgatagcgtgccagcagtaaaattcgctgctcgggtttaacgtagccgcttagcttgtcgagcagatcgtcgagtttatcgtcgggcagcagggtcaccgctttcttgtcgccagccgtgaggctattcagcggttttgccagctgatgcgggttttgctgaataaaaccattagcaatctcgccgatacgagcgttaaatcgataggtcgtatccagcgcgcagcaatccccttcgccaaagtagtggttaaacgcagtggttaaagagagctgcgcgccgctgaagcgataaatcgcctgccagtcgtcaccgacggcaaataacgtcgtctgcttattctgccgacgcagagccgccagtagttcagcacgctgtggagaaatatcctgaaattcatcaaccagaatatgtttccagggactcacaaagcggcctttatccagtatgttgaccgcctggtgtataagcccggagaaatcaacggcattttcctctttcaacgctgctttccaggctttcagcagcggggccatcagtttcacacgcttattaaaaagatcgcggacttcttcagggcgctggcgatcatctccgcctgcgagccgccatgcatgcgcattaaactaacccagcggtcaaggcggccggccaggcggcgcagcagcgcgcgatcctgccaaaaatcgccttcgtcaatctgccactccatctcatccaccagccactgacgccagcctttcgcctgcgcttttttctcctgacactgctgctgccaggccttcaacaatagcttttgccgggcggctgtatcgttttccagcttactgatcgccggcactttcttgctgccctgctgaataatatgtaacgccagtgaatggaaagttcgcgcggcaatctcatcggttcccaatcgctcctgaatacgttcatccatttcctgagcagcctgacggccaaaggccagtaacaggatctgatccgccgccgcctcgccgcgatttaacagccaccccgcacgagcaaccagtaccgacgttttgccgctaccggcgccggcaagtaccagcaacgaacgctcgccgttcactaccgcacgcgcctgcgccgggttgagcggcgaagactcaatcttatcgaagaaagcgcgatactgttctagcatggcttcggtataggcttgattatgcgccaggcgagcctcgtcaatatcgctgagccaacgttgacactggcgccacagttcgcggcaattatcaaattcatccagacggctctcaggaaaaggcaggcccgttaaggcccggccaattttcgcctgtacatcagagacctgctggcgcgtcaaccacttaccttcagcgctggctcgctcaatttcacttaactgctggcgtagcaattccgcggcgatttcgctcatctccgcgctccactgctgccagagagtattgagatgatgaaagaaatgctgcgtctctgcccattcggtaccatgcagacgcacaactttgctttcaggcagcacgaactccagttcgccccacaccaggccacgcttacattgaactgacaataactgattgaaaggtataagatactcatgacgatcgcctgagacttttaccccggcattaagcaactgcacccgatcataaggatgctgtgccatgcgtttgcccaatgttgtcgctttaagttccatatatcgccaaatttcaatcagtttgaatgtttttaagtttaaccgcccgcgagcaggtgctccagcgcaaaaaaacgttacaattgccgggtcttattatccacagggttaaccagagggtttatgcgtaccattctgaatattttgaactttgttcttggcggtttcgccaccacgctcggttggctactggcgacgctggtcagtattattttgatcttcacgttaccgctgacgcgttcatgttgggaaatcaccaggctatcgctgttcccctacggtaatgaagcaattcatgttgatgaactggaacctgaaggaaaaaacagcttgctgaacgcgggcggcactattttgaacattttgtggttcatgtttttcggctggtggctgtgtctgatgcatattttcagcggtatcgcgcagtgcctgaccatcattggcatccctgttgggatcgccaattttaaaattgccgccattgcgctttggccagtaggacgccgcgtggtctctgttgaaacggctcgcgccgcgcgcgaagccaacgcgcgccgtcgctttcagtaattgtacggaacactgttatgttaagcccctgctccgccgttatacatggaatagcgcctggctatataacgccaggatatttattgcgctttgtggcaccacggctatgccgtggtggattggcgaagtcaaactcaccatcccgttaacgcttggcgtggttgccgcggcgttgaccgacctcgacgatcgccttaccgggcggttacgtaatctcgctattacgctggtctgcttctttattgcctccgcgtcggtggagttgctgtttccatggccatggttgtttgctattgggttaaccctgtccacgacgggttttatcctgctcggcgggctgggtcaacgctatgccaccattgctttcggcgccttactgatcgctatctacaccatgttaggggtcaccctgtataacagttggtacctgcagccgctctttttgctggctggcgccatctggtacaacgtattaacgctcgccgggcatcttatttttcccatccgtccactgcaggataaccttgcgcgcagctatgaacagctggcccagtatctcgaacttaaatcgcgactgttcgatccggatatcgaagatgaaagtcaggcgccgttgtatgacctggcgctcgctaacggcaagctggttgccacgcttaaccagacgaaggcttctttactgacgcgcctgcgcggcgaccgcgggcaacgaggcactcgtcgcaccctgcagtactatttcgtcgcccaggacattcatgaacgtgccagctcatcacatattcagtatcagacgcttcgcgaccatttccgctacagcgatgtgatgttccgttttcagcggatgctgtcaatgcaggctcaggcgtgtcaaaaactctcccgcgccattctcttacgcatcccgtatcagcatgatgcgcactttgaacgcgcctttatgcatctggatgcggcgctggatcgcgtccgcgccagcggcgcgccgcaagatcaggtcaaagcgctgggttttctgctcaataacctacgcgctattgatgcgcaattggcaaccatcgaatcggtgcagaccagcgtgctggccagcaaccatcccgaaaacctgcttgcagacgatcgccccagcgggtttagcgatatctggttacgactgcgcagcaatatgacgccggaatcggcgcttttccgccacgcggtgcggatgtcgctggtgctgtgcgcaggctacgcctttattcagtttaccggtctcaaccacggttactggattttgcttaccagcctgtttgtttgccagccgaactataacgctacccggcaccgcctggcgttaaggatcatcggtacattgattggcgtcgcgatcggcctaccggtgctgctactggttccttcggtcgaaggccaactgctgctcattgtactaaccggtgtgctgtttttcgcttttcgcaacgtccagtatgcacatgccactatgtttatcacgctgctggtactgctgtgctttaacctgttgggggaaggattcgaagtcgctttaccgcgtatccttgatacgctgatcggctgcgccatcgcctgggcggcagtgacctttatctggcctgactggaacttccgtaatttacctcgcgtactggatcaggccatcaacgctaactgccgctatcttgacgctattcttgaacagtaccatcagggtcgtgataaccgtcttgagtatcgcgtagcccggcgtaatgcacataaccgggatagcgaactggcatcagtggtatcaaatttatccacagagcctaaagccgacaacacgatgcgtgaaactgcattccgcctgttatgccttaaccatacttttaccagctatatttccgcattgggagcccacagggaaaagctgacgactcctgaaatactggcgttactcgatgatgctgtctgctacgttgatgatgcgctgcatcattctcccgcagacgaacaacgcgttcagcaggcgctcagtaatctgcaatcgcggattcaacatctggaaccgcgagctgacagcaaagaaccattggtcctgcagcagattgggctactgctcgcactgctgccggaaatatgtcgcctgcaacgccggattgccggtcaaccggaataatcctccacgctgtatccttgcgtattagcccactcccgtagctcctggcgccgctgcgccgggagcgcggcggaatgaatgccggcaatcgcgcccgccagggactcaaggacattgattgatattcctttattatgctctctcaattttaaccagctcttttccgccccgagtgtacgcagcattttcacatcggttattccggcatggatcaacatcaactccatatggaagctgatattaggcaaattctttagcctgccggaatcacgctgatgctgcttatcgcttcgcgccgaatgcaatgacagctgcgacagatgaaacagcattttactgtcctgccaaagtgcttcatctatccggtaatactttaaggccaccggtcggccattcttgcgcatcattagcatcgggctgtgatgttcaacccgataagaggcactttgttcgcaaaccctaagatagatttcgccttcagccaccatggcgaatacggtattttcaatcgccagactataaccaccgaataatggccgactacagattttgcctaatggggaaagacactcctgaaactggaggaaccgtaatttagaaattttcttcatgatcattcctttggtaatcatggacataaaagcagttttattaacggatccgttattgaagaaaataagtgagttcgttttgtgcagcaagatgaattttggcttcatctcaatcagctcgccgttttgcgaggcgctttcaggaaaaagttactctgcaattcgcgtttcagagactcgctgaatacttaagtaatgttaattgatgaacagcatatcggcaccatcgacagcatggtcgggagtcctgtagcagagataaaggtaaaagaatatctcctgcacgtcccatgcacagacagtgaattcatataaataagtcgccgcgaccatgtttcatagttgggtagagtgcataaaatatatgcaaaagtgggaaaatgaggttgacgttaactactggtggatatactgtatatgcatacagtaactcacaggcgagatagactatgtttacttcagctcacgcaaatcgttcaccactgacttcggcttcagtacgtcgcccttcgcacagcgtcgtcgaacattcagccactgggctgattagtgaaatcgtctatcgcgaagatcaacccatgatgacgcagcttctattgttacctttattacaacagctgggtcagcagtcgcgttggcaactgtggctcacgccgcagcaaaagctgagtaaagaatgggtacaatcgtccggccttccgctttcaaaagtgatgcagataaaccagatgtcgccctgcaacactctggaatcgatgattcgcgctttacgtaccgggaattatagcgtggttatcggctggctggtggatgaacttacggaagaagagcatgaacgtctggcgctcgctgctgaagagggtcatgcgatgggcttcatcatgcgcccggtgagaaatacaagccagcctgggagacaattaagtgggctaaaaattcactcaaatttatatcattgagtgaaattaggattaatcctggaattttttttgcctaatcaaaaaccactctcacaaagtggttaatttcaccgagatcccggtgtggtgcggtttcgcgactttttaccatgttcacaaattaaccatatttgttaaatattgtgtatacaacccttttttttcatatgcctgaccgagttcacacttgtaagtttctaactaagttgtagactttacatcgccaggggtgatcggcttacgctgcatgtatcagcatagttaacaacgagtcacgccccggtgaaggatttaaccgtgaggtcttatgtaccttcatggcgaattttggatgataatgaggcgcaaaaaatgaaaaagacagctatcgcgattgcagtggcactggctggcttcgctaccgtagcgcaggccgctccgaaagataacacctggtatgcaggtggtaaactgggttggtcccagttccatgacaccggctggtacaacagcaacctgaacaacaatggtccgacccacgaaagccagctgggcgctggtgcgttcggtggttatcaggttaacccgtacctcggtttcgaaatgggttacgactggctgggccgtatgccttacaaaggcgacaacgttaacggcgcattcaaagctcagggcgttcagctgaccgctaaactgggttacccgatcactgacgatctggacatctacacccgtctgggcggcatggtatggcgcgctgactccagcaacaaccgtatcggtgacaaccatgacaccggcgtttccccagtattcgctggcggcgttgagtgggcaatgacccgtgacatcgctacccgtctggaataccagtgggttaacaacatcggcgacgcaagcactgtaggcgttcgtccggacaacggcatgctgagcgttggtgtttcctaccgtttcggtcaggaagacaatgcaccggttgtagctccggctccagctccggctccggaagtcaccaccaagaccttcaccctgaagtctgacgttctgttcaacttcaacaaagcaactctgaaaccagaaggtcagcaggctctggatcagctgtacacccagctgagcaacatggacccgaaagacggttctgcagttgttctgggttacaccgaccgcatcggttccgagcagtacaaccagaaactgtctgagaaacgtgctcagtccgttgttgactacctcgtagctaaaggcatcccggctaacaagatctctgctcgcggtatgggcgaatctgatccggttaccggcaacacctgtgacaacgtgaaagctcgcgctgcactgatcgactgcctggctccggatcgtcgcgtagcgatcgaagttaaaggttacaaagacgtagtaactcagccgcaggcttaagtttcctacgataaaaaaccccgctgatgcggggttttttttggcctgattttgagttcagaggaaaaatctcaagcaacgttggccgctacttactcttttcctaagagcacctgcagatcgtgcttcaggctcgacatcttgctggcatatttttctttatgctcggcgtcttcaatcagctgtacgatggtttctgataatgtcttgcctcgccgttgtgctagccccgccaggcgctgccagacaatgaattccagatcgatggactttttccgcgtatgctgatgctcggcgttaaaatgacgcttgcgtcttgcgcgaatagtctgcttcatccggttagcgagctccggattcatatgctgatcgatccaggtattcaccagaacaggttcattttcgagcgtcagcaagacatcgaccgcggcttgcgcagcgctggcttcaatgtagcgggtaatcaactcaccttcccggtgcttctttaccagatatttccatttccagccgctttcaaggttttccagttgttgatatttcattgcgatctcaatgtgaccgtgtaactcatttcaggatatcagttttttccggatgtgctgaaaataaatcatcttccgtgatgtggacgatttcattattaacgtgaaaacacaatcctccgtgtgcgcagacgcggtatcgggtataatcgctcgttttacatctgactaaaaaacagcgactttgaccattacgaaacttacccgaaacgacctcgctcctgatacggaaagttatcaggcgctgtttacccaggtcaatctcgccgagacagaggcatccctcgccggcgatctacaaccccgtttattttatgcgctggaacagcttctgatcacgccagccatttcatcatttatgctggtaaaggcgccggaagagccggaatatctgcattgggtagccgaagccgcacgcagcctgcagcagccaacgacagcgctatgcggtgtacgctatcaggtcaacggcggcaacgtaaccatgtcgccggcacaaagcgcggaagacaattttgccagcaacggtccggttgaatccgccgactggattgaagcggaacagctctttggttgcgttcgcctgtttaacggcgaaatttcgctgcagccgggtctggtgcaccgcgcgaacggcggcgtcctgttactctcactgcgtgcgctgctggcccagccgctgctgtggatgcgcctgaagaatatggtgacccgtcagcgctttgactggctgtctattgacgaatcccgccctcttcccgttagcattccctccatgccgctgaacctgaggatcattctgatcggcgagcgcgatgcgctggctgattttcaggagatggaaccggaactcgcgtcgcaggccatttacagcgagtatgaagacaacctgcagatagccgatgccgacaccctgaaactctggtgccaatgggtctgtcaaaatgctcgccagctttcactgccggggccagcggctgacgcatggccgctgctgattgaagaaggcgtgcgcgataccggcgatcaggagacgcttccgctttcccctctctggattggccgccagctgcgtgaagcggcagccttctgcgaaggcgaatggattaacggcgcggagatgcaaactatgcttgagcgtcgtgaatggcgtgaaggctatcttgccgagcggatgcgcgatgaaattcttctcgatcagatcatgattgataccgaaggcgaatgcatcggtcagatcaatgccctgtcggtaatcgaatttccgggccacccgcgcgcctttggcgaaccttcgcgtatcagctgtgtagtccatatcggcgacggcgaatttattgacgttgagcgtaaagctgaactgggcggcaatattcacgccaaaggcatgatgatcatgcaggcgtttattatgtccgagctcgaacttgaacagcagctgccgtttagcgcatcactgaccttcgaacagtcctacagcgaagtggatggcgatagcgcctcaatggccgagctttgcgctctcatcagcgcgctggccaatgtgccgatcaaccagagtattgcgattaccggttcggtcgatcagttcggtcgcgtccagccggtcggcggactgaacgaaaagattgaaggtttcttcaccatctgccagcagcgcggattaacaggcaagcaaggcgtcatcatcccttcagccaacgtccgtcatctgagcctggcggcggaacttcgccaggcggtggctgacgagcagttctttatctgggccattgacgacgtaaccgaagctctgccgcttctcacccagctgcagtgggatggtgaaggacaaacgctacgacaaactattcaggaacggattgcgcaggcgatgcaacaagagactcgccatcgttttccatggccgctacgctggttaggcggatcaaattcgaactgatcggacttgttcagcttacacgtgttagctatcctgcgtcccgaactcaaaataaggcttactgaaaacatggtagataaacgcgaatcctatacaaaagaagaccttcttgcctctggccgtggtgaactgtttggcgcgaaaggcccgcaactgccggcgccaagcatgctgatgatggaccgcgtcgtcaagatgaccgaaaccggcggcaactacgacaaaggttacgttgaagctgagctcgacatcaacccagacctgtggttcttcggttgtcacttcatcggcgatccggtaatgcctggctgtctgggtctggacgcaatgtggcaactggtaggcttctatctgggctggctgggcggcgaaggtaaaggtcgtgcgctgggcgtaggcgaagttaaatttaccggtcagattctgccgacggcgaaaaaagtcacctatcgtatccacttcaaacgcatcgtaaaccgtcgcctgatcatgggtctggcggatggcgaggtgctggttgatgggcgtctgatctactctgcaactgacctgaaagtcggtctgttccaggatacttccgcgttctgatttacctaccgtacttatcctgaagtacaaaaggtcctgaagtacaaaaggcgaagccttcgcagagcgaaggcttcttttttaaagagacagtcaggcagtctgcaccctgtcctccatggcttctcgccaacctcctagccaatgggacctctgattaagggtctggtagggacacatttctttcgatctgccggtaatgccggcctgatatccacgctgatgtgcccgttccaggcgatctcgtttttgtctcttcatgcctcgtttccctcattatttgatctggtggaaaagaaaacagtggtcactaaatatgcaaccacgtataacctttaccgcgaaacgaaggcagcgtcaatgcgcaaaattcacgccagtgtcatatttgtgagctatatgaaagttcatttgtacaaaaatcgtgagccagcacaactatcaacctgacgcggcaaataaaaaagccgcggcgattttacaggtcgcagcggctttaattttattaattttacttatggcaggcggttcaactcactcgctatcgcggtagcttcctggctccaggcctgcgccagggtcttaaccatcgcgtcatagccatcctgctgttgcttaagttcaatattgaacggacgcttgattaactgcccctgatgcttaagcagccattcaccgctaacaatgacccggccgtcgtagcggccgtggaagccgctaacggagacgttaagcgtatcctgctcgctgcctaacggctgcgatgccaccacccaacccggcagttgattgctcagattcgccaccagcgtggtacgtaactgctgatccagcgggctcgcccacaggttgttattggcgatgacatactgtacatctgtggtctgataaaccacgccattgccggccagataatcagggatactgacctgctcgacccacagcaaattcttgctctggtgagcagcgctctgcgcgccgctctgcgctaccggcaattgatagtaggtcttgctctctccactgctgctgcaggccgtcagtacgcataccgctgccgctactaaccattttttcattatttcgctcccttcggctgcggatcttttttatccttggcctcaaataccagcgcattgctcttgtcgttgagggttttcagaaccggctgcagttcacgaagcacctgatccagtcgctgcatatccgcaaccatcttattgtaggccgcagagccaggctggaagccctgcatactgcggttcaactcgcgcaacgtactctgcatatcggcaggaagctgctgcatcgactggcttgaagtgatcttattcaagttatcgagcgtagtctggacacgctgcatggttttctggctctgcgccagggtactggtcgcctgctccagcagtgggttaatcggcaggttgttaatcttatcgagcgcatccatcagacgctgctggatctgagccagaccaccgctaacggttggaatgatcggatatccgccgaactcctgaatcttgccgcgcggaggcgctttcggatagaagtcgagatcgatatacagcgcgccggtgaccaggttgccggttttcagcgaagcacgaagcccgcggttgatcagatcgtcaatatgcgcgcgaatgttcggatcgccgcccagttgattgatcagacgttccggctcgatacgtatttcaaccggaatacgataatcatcgttcaggctctgcttcaaaccggggataaagaacggcactttgccgacggtgccaaggcgaataccgcggaattcaaccggcgctcccggctgcagaccacgcactgaatctttaaagaacaggacgtaatcgatatgctgggtgaacaccgaatcctggatactcctctgatcgtcaaacaggtggtattccgttttattcgccaccggctcgccgagatccagtccttccggaatgtcaaagctcactccgccgccaaacagcgtcgacagcgatcccatctcaacacgcatccccgcggacgtgaggtcaaccgcgataccgctgtctttccagaagcgaacgttagtcgtcaccagacggtcgttcggcgcgttgataaacagctgataagtgatgcggcgcttctgcgtatcaaaggtgctggtttcaaccgaaccgacgcgatagccgcggaacagcaccggatcgccaggcgagagctgccccgctttactactttccagcagaacacggatacctttggcatccggtgaagccagtggcggcgaatccaacagcggatactgcggcgccacagaaccttctttaccaggctgcaattcaatataggcgccggaaagcaaggtgccgaggccgctgatcccctcgcgccccacctgcggtttcaccacccagaacactgagtctttatggagtagcttctgcatccccgagttcagacgcgctttaatttctacgtgtttcaggtcatcagtcaggatagcgctttccaccaccccgacatcaacgctgcggctcttgatacgcgttttaccccttcaatgccttcggcgttggtggtgataagcgtcacctccggccctggtggctgtagtggtaaaacagtatccatgcgccgatgagcacagtcacaatcggaaagatccagaccggtgaccagttcttcaccttctgcactttcgcttctccgctcttattttccatgctgttgcatttcctcatggcttggatctggttcacggtcccacaatagacgtgggtcaaacatcatggccgagaacatggtcatgacaacgaccagcgcgaacatcaccgcgcctatcgccggatagatattcatcaagcctcccatgcgcaccagcgccgagagtaccgcgatgacaaaaacgtcgatcattgaccaacggccaacaaattcaaccacttcatagattaggtgcatacgctctgaatcacgcgcgccatttccgttcgcgctccagcacagccagccgatagcgatcatttttaacgttggcaccataatactggcgataaagataaccagcgcgaccgggtaagagccctcactccacagcagaacgacgcccgccatgattgtcgacggcattttatcgcccagcagatcggtaatcataatcggcagaatattggcgggtaaatagagaacaaacgacgtcatcagcagcgccagcgtccactgcaggctgtttttacgccgcggggtaccttttgtgtggcagcgcggacactccttctcatccgctggcagcaccgccgtgcagcacgagcaggagcgtaacccctggcgaagccccggcacgccagggcgcagcggctgcttaatgaccggcattggcgcaatatcatcccataaccagcggcgatcgacgcactgaaacgcccgcaactgtagcaggcagaacagacaccagggaacaaagctcagtccaacgccgatatcaccgtaggccatgagtttaacgaagctgaccagcacccggcgaggaaaatctccgccatcccccagcttttgaggtgaaacaaaatccgcgccagaaacgccttcaagcgtgaaggcatatgaacgcgatttaccaacaacaagatggtcaccagacaaaacgccgggaccagttggacaaagagtaaaaagaacgtaccgaggctggcgtaatcctcgctgaacagcacattaggtatttccagcagctcaatttcgctgctgatcccgccgactttcatataaacaaaaggaaacaggttcgccagcagcaacatgaacagcgccaccagcgcataggccgtgggacgctgccgcggcgcgtcccacgatgtggtgagcgtggtgccgcagcgtgggcatgcggctttctggcgatgctccagcggcggcaaagccaccagcagatcacattgtgggcacaatatgtgccgcgcagcatgatgatgatcgcacatgaacactcctcagcttaagcgccgtttttgagtccttcgagatattcccagcgttcaaaggccgcttccagggcctgttccgcttccgctaactgcgccagcacctgctgggtctggtcatgcggctggccgaagaacgaaggatcggcaactttttcctgcagcgtctgcagttgagtttccagatcttccagcttctgcggcagctgttccagttcgcgctgcaggttatagcttagtttgctggcggcgcgtttgacactttctgctttcggttgagcgacttccgccgttttttttacaatcggctgtttattcgccagcgactgcgcttgctgtccgcgcgcgtcgtgataaccgccgatatattggccgatacgcccaccgccctcgaagatccagcactcggtcacggtgttgtcgacaaattgacgatcgtggctcaccagcatcacggtgccctggtagccatcgatcagctcttccagcagttccagcgtttcgacatcaaggtcgttagtcggttcatcaagaatcaataagttactgggtttcaggaacaagcgcgcgagcagcagacggttacgctccccgccggacaacgcgcgtaccggggtcatcgcccgttttggatggaacaggaaatcctgcagatatcccagcacgtgacgcggcttaccgttaaccatcacctcttgtttaccttccgcaaggttatccatcaccgtgcgatccggatccagctccgcgcggtgctggtcgaagtaagcgacttccagcttggtgccgacgtggatacgcccgctatcggcctgtagctggccgagcatcagcttcagcaacgtggttttaccgcagccgttcgggccgatcagcgcaatcttgtcaccacgctggatttgcgcggagaaatctttgaccagcactttgccgtcaacctgatagttgacgttttccatctcaaagacgattttgccggagcgagaagcctcctcgacctgcatcttcgcgctgcccatcacttcacgacgctcgccgcgttcgcgacgcatcgccttcagcgcgcggacgcggccttcgttgcgggtacgacgcgctttaatcccctggcggatccacacctcttcctgcgccagcttgcggtcgaattcagcattctgcagctcttcgacgcgcaacgcttcttctttatccagcagatattgatcgtaattgcccggataggtcaccagcttgccgcgatcgaggtcgacaatgcgcgttgccatattgcggatgaaagaacggtcgtgcgatataaagatgatggtgcctttaaaggatttgaggaacccttccagccagtcgatagtttcgatatcgaggtggttagtcggttcatccagcaacagcacgcgcggcccgctaaccagcgcgcggcccagcgccgctttacgcagccagccgccggacagcgacgccagctgcgcgtcggcgttaaggccaagctgctcgatcacttcattaatacggctatctaactgccacagccccaggttatccagctgttcctgcaggcgggccagctcatttaaatttttgtcgctcggatcggtcatcacctgatgagaaacatcatgataggccttcagatacgccgcctgttcggcgatcccttccgcgacaaaatcgtacaccgtaccagcgacattacgcggaggatcctgctgcagacgcgcgacgatcagatcctgttcataaataatgcgcccatcgtccagcccctgctcgcggttgaggattttcatcagggtcgatttaccggcgccgttacgccctaccaggcaaacgcgttcgttatcttcgatatgcagttcggcattatccagcagcggcgcgtcgctgaacgaaagccaggcgccgtgcatactaatcagtgacattctttattcctttcaggccgcggtaatcagccagcagttgtggatctgacggttgcgggcaaaatcctgcgacagcgttttttgcgaaatttcttgcgccttcaggccaagagcagccagcccgtcatgatccatacggaaaccgcgtttgttattcgagaacataatcgtcccgcctttacgcagcagacgttttaggtcagtcatcagacggatatgatcgcgctgcacgtcaaaggcatcttccatccgtttggagtttgagaaggtcggcggatcgataaagatcagatcgaactgctcggtgctttcccgcagccaacccagcacgtccgcctgcatcaggcgatgcgcacgaccggttaaaccattgagacgcaggttgcgttccgcccattccagataggtgcgcgacatatcgacggtcgtggtggagcgcgcgccgcccagaccggcgtggacgctggcgctgccggtataggagaacaggttaaggaaatccttacctttactcatctggcccagcatacgacgggcgatacggtggtcaaggaacagaccggtgtcgagatagtcggtaaggttaacccacagacgcgcgttatactcctgtacctcgataaagtcgcccttctccgccatcttctggtactgatttttacccttctgccgttcacgggtcttcagcaccagcttattcggcgcgatccctaacaccgcgatagtcgcggcgataatatcgaacagacgctggcgcgctttgtgcgcatcgacggttttcggcggcgcatactcctgtaccaccacccactcgccgtagcggtcgatagccacgttatattccggcaaatcggcatcgtacaggcgatagcattcaatgccttcctgacgagcccacttttcaaacttcttcaggtttttacgtaagcggttggcaaaatcttccgccagcatcgccggcttgccgccttcgctttccgctagatgatagttcttctgtacgcagtccagcgggccgtttttggctttaaactgtttatcggcacgcagctgcaggcagctcagcaattccggcgaggcgctgaagaccgacaggttccagccgccaaactggtttttcataatccgccccagcaggctgtgcagggcaatcagcgccggttcgctttccagacgctcgccgtacggcgggttgctgataacggtgccgtacgggcctttcggcagcggattattgagctgcgcgacgtctttcacttcaaaattgatgagctcgccaattccggcacggcgggcattgcggcgcgcgcgttcaatcacgcgctcgtcgacgtcagagccgtagaagcgcgattcataagcggccagtccctgacgcgcgcgcgtttgcgcctcggctttcacctctttccagatagcgtcatcgtgctgcgcccaaccgccgaagccccaatggccgcggtgcaggcccggcgcgcgatcggtcgccagcatcgccgcttcaatcagcaacgtgccggaaccgcacatcggatcgagcagcggcgttcccgccacccagccggagcgcatgacgattgccgccgcgaggttttctttgatcggcgccatgccggtaccatcacggtagccgcgcagatgcaggccttcgccgcttagatccagcgaaatatgcgccgtctctttgttcagccagacgttgatacgcagatcgggattctcacgatcgacattcggacgcggcagatttttacgcgtaaagctatcgacgatagcgtctttgacttttaatgcgccatactgactgttgcggatctcctcattgaggccgctaaaatgcaccgcaaaggtggcgtcagtggtaaagatctccgtccacggaatcgattgaaccccaggtagagatccagatcgctatacacgctgcactcacccagcggcagcatgatgcgcgaggccagccggctccacatcaggctttgatacagcaggcgcgtatctccctgaaaatgaaccccgccctggacgacctggcacgccgtggcgccaagtccttccagttcagtttttaacagctcttcaagaccacgagccgtgctggcaaacagagatttcatatcgtcacttttacttaaagaaaattggtgcgcattatagccaatatgtgccctatgtcataaagttaaaggcttatttttgaacccaggggcagcgtatggtaacgctatctaaactttttattcatcccgtcaaatccatgcgcggaattggcgtcacccatgcctttgccgatattagcggcatggccttcgaccgcatcttcatgctgactgaaaccgacggtacgtttattaccgcgcgccagtttccgcaaatggtgaaattcctgccttcgccgcttcacgacggcctgcacttgaccgcgccggatggcagcagcgcgttggtgcgctttgatgatttcgccctcagggcgagccgacggaggtgtggggcaaccatttcaccgccttaatcgcgccagccgccatcaaccagtggctcagcggcttcttcaaccgcgacgtccaactgcgctggctcgggccgcagctaacccggcgagtaaaacgtcacgacgcggtgccgctctccttcgccgacggttatccttacctgctcgccaatgaagcctcgcttcgcgatctgcagcaacgttgccctgccagcgtaagcatagaacagtttcgccctaatctggtggtcaccggtgccgcggcgtgggatgaagatagctggaaagttattcgcatcggcgaggtggtatttgacgtcgccaaaccctgcagccgctgcattttcaccaccgtcagcccggagcgtgggcaaaagcatccgtccggcgagccgctggaaacgttaaagcgttttcgtaccgcacaggataatggcgacgttgattttggccagaatctgatcgcccgcaacagcggcgttatccgcgttggtgatgaggtggaagtgctgacgcgcggcccggctaaagtctatggcgctggcgatagcgacgatactctggcggccaatgcgcagccaaaagcgacggttgagattgagtggcaagggcaacagtttaccggcaacaatcagcaggtactgctggagcaactggaacaacagggcattcgtatccattattcctgccgcgccgggatctgcggcagttgtcgtatccgcctcgaagagggtgaagtgagtccgttaaagaaaaatgcggtcgccgcggatggcaccattttatgctgcagctgcgtaccgaaaaccgcgctgcgcctggcgccttaaaccgcctgccccaggctgtagctggccgcgctctgtgccggctgcagtctgtcgttcataattttaatcacatcgcctaactgcatcacccggcctgccagagtcaatcccggctgcgccagcaggcaaagcgtggcgttttcacccggttcaaccaccagcaaattgacctgctcgccggtatcgctgatccagacgctggcggcgtcgccgctggtcggctgccagttctgctggtgagtagtgaaatgccagctcttgggcatctgcggtttcagaaaacggatcgcggttaaggcatttaatactaattcggcacgctgctctttgtttaattcaatatcgcggcatttttcttcaaaagaaaaatagagcgccgcgtcatcgacgcaaaatcccgacggcgcgaaagcgtcaggcgttaacatgcgccgggcaaaacgtgagcgaaataacataccattggccagatcaagcatcatgcggtcatgctcttcgtcgtaataccaacgccagttatcgtcaggtttaatccgcatttctacccccgtcctcttccacttccttctgcaaagcaatggcatcctgctacagaataatttctaaaattaagaaaagactaaaatgtctaaataagcaacaatgaaggaatataaaacaaccagggccggaaataaagccctggggaagattcagaaggggaaaagattagatgtgtgtaacaatttctttaatcagcggtggccctttaaaaataaacccggaataaatctgcaccagcgtggcgccagcagccagcttttcacgagcggcaatcaccgagtcaataccgccaactccgataattggcaaacgaccatttaattccgtggccagcatacgaataatctcggtgctttttaattgtaatggacgaccactcaacccaccggtttcatcacaatgcttcatcccctggaccagtgaacgatcgagggtggtattggtagcaatgacgccatcaatattatggcggactaagctgtcggctacctggatcaattcttcgacagaaagatccggggcgatcttcaccgccacaggaacatatttttgatgtttctgttgaagttcgagctgcttatttttaataccgccgagtaaatcatccagcgcttcaccatattgcaaagtacgcagccctggggtattcggcgaggagatattaatggcgatatatccagcgtatgggtagactttttccatacaaatcagataatcatctttaccctgttcaaccggggtgtctttatttttaccgatattaatcccgagcacgccgtcaaaatgcgcttttttcacattctcgaccaggttatcaacaccgtggttattaaagcccatgcggttgatcaaaccttcggcatcgacgagacggaagatcctcggcttgtcattgcccggctgtggacgcggagtcacggtaccaatttcaattgagccgaagcccatcgcaccgagcgcgtcaatgcactcgccgtttttatcaagcccagccgccagccccagcggattcttgaaagtcagccccatgcaggtaacgggtttcgacggtactttttgtcgaaccagcatttccagcggcgtgccggtgacgcggcgtaattgttggaaggttacttcatgagcgcgctcaggatcgagctgaaaaagagctttacgaacgaagggatagtacatgaactctcctggattcccggtgtgcaaaccgggggcgtattatgttcgatccgcgtccgaaagggaattgacctgcgacaaaaaatcacgtgtccaacgcaaacgtttacctctttgccgcctgttatgcgcattttggcaatttaaccccggaaaaatcatttagggaaataaacgccctctgtcacactgccataaaatgttatcaattatagataaatgcaaacatttggttataaggagagagtatgcgcgttattacactcgcgggcagcccccgctacccttctcgctcaagcgcattgctggagtacaccagagagaaacttaccgcggccaacatcgaagtctatcactggcatttacagaattttgatcccgaagatctgctttacgcccgcttcgataaccccgctctacataccttaaatgaacaactggccggcgctgatggcctgattatcgccactcccgtctataaagcctctttttccggcgcgctgaagacgctactggatttactccccgaacgcgctctggaaggaaaaattgtcctgccgctggcgactggcggcaccatcgcccatatgctggcggtcgattacgccctgaagccggtgcttaatgctctcaaagcacaggagatcctccatggcgtattcgccgatgacagccaggtcaccgattatcaacataaaccgcagttcacaccgaatctgcaacaccgtctcgaccaggcgcttgagaccttctggcaggcgctgaatcgccgcaacagccgcatcccggggctaaagacgttacagggggttgagcatgcttaatcctctgcgtgccctgaccctcggcgggctactcgcgctttcctttattacgcatgcggccccgcaggcgccggaagcgttacgcatcggctaccagaaaggcagcgtcagtatggtgctggcgaagagccatcaactgctggaacagcgctacccgcaaactaagatttcgtgggttgagtttcccgccgggccgcaaatgctggaagcgctgaacgtcggcagtattgatatcggtagtaccggcgatattccaccgattttcgctcaggctgccggcgccgatctggtgtatatcggcgctgaaccagcgaaaccgaaagcggaagtgattctggtcgccgataacagcccaatcaaaagcgtggctgaactgaaaggccgtaaggtggcgttccagaaaggctccagttcgcacaatctgctgctgcgcgccctacagcaggcaggcctgaaattcagcgatatccagccggtgtatcttgcccccgccgatgcccgcgccgcttttcagcagggtaatgttgatgcctgggctatctgggatccctattactctgcagcgctgctgcaaggcggggtacgggtactgaaagatggtagcgacctgaagcagaccggttcgttctatcttgccgctcgtccttatgccgaaaagaacggcgcctttatcgaaggggtgctggcgacctttagccaggcggatgccctgaccatcagtcatcgccaggaaagtattgccctgttggctaaaacgatggggctacccgaagcggtgattgccagctatctcgaccatcgtccgccaactgcgatatcgccggtaagcgctgaaacggccgctcgccaacagcaaaccgccgatctcttctatgagaacaagctggtaccgaaaaaaatcactattcaaaaccgtatctggcagcctgcccccgcacaaggagcaaaatcatgagtctgaatatgttctggttcttacccacccacggtgacggccgctatctgggcaccgacgaaggggcgcgaccggtagactacagctatctgcagcaaatcgcccaggccgccgaccggctcggcttcaccggcgtactgattcccaccgggcgctcgtgcgaagatgcctggctggttgccgcgtcaatgatccccgtaacccagcggctgaagttcctcgtcgcgctgcgcccaagcgtggtatctcccaccgttgccgcacgtcaggctgccacgcttgaccggctctctaatggccgggcattgttcaacctggtcaccggcagcgatccgaatgaattagctggcgatggcgtattcctcgaccacaccgaacgctacgaagcctccgccgagttcacccatatctggcgcaaactgatggaaggtgaaaccgtgactttccacggcaagcatcagcacgtgcgcggcgcgaaactgctcttcccaccacagcagcatccgcgaccgccgctctactttggcggatcctcggacgttgcgcaggatctggccgccgaacaggtcgacctctatctgacctggggcgaaccgccggcgcaggtggcggaaaaaatcgcccaggtgcgtgaaaaagccgcgcgcctcggccgcagcgtccgctttggtattcgtttgcacgtcatcgtccgcgaaaccaatgaagaggcatggcaagcggcggaaagcttaatctcccatctggatgacgaaaccatcgcccgcgcgcaggccgccttcgcgcaaaccgattctgttggtcaacatcgcatggcggcgctgcacaacggtcgtcgcgacaaactggaaatcagcccgaacctgtgggccgggtcgggctggcgcgcggcggcgcgggtaccgcgctggttggcgatgcggctaccgtcgcggaacgaatcaatgaatacgccgaacttggcatcgacagttttatcttctccggctacccgcaccttgaggaagcctggcgagtcggcgaactgctgttcccactgcttgatgtcaacgtcccgacgatccctcagccgcaaaacctgcgtctgcagggcgaagctgtggcgaatgaatttatcccgcgtaaagcggcgcaaagttagggagcgaactatggcagcttcttcgcagaaacttctattgcgcctcgccccctggtttttaccggtgggcaccgtgctgatctggcaattggcgtcatcggtaggctggctctcaacccgtattctcccctctccggagggggtactgaaagctttctggacgctctcggccagcggcgaactgtggcaacacctggcgatcagttcctggcgcgccttacttggcttcgccattggcggctccatcggcctgacgctcgggctcattagcgggctctcgcgttggggcgaacgcctgctggatacctccatccagatgctgcgcaatgtaccgcatctggcgctaatcccattggtgattttgtggtttggtattgacgaaagcgccaaaatatttcttgtcgcgctggggacgatgtttccgatttatatcaatacctggcacggcatccgcaatatcgatcgcggtctggtggaaatggcgcgtagctatggcttatcaggattcgccctcttccgccacgtgatccttcccggcgccctgccctcgattatggtcggcattcgcttcgccctcggattgatgtggctgacgcttatcgtcgctgaaaccatctccgcgaatgccggaatcggctatctggcaatgaacgcccgcgagtttctgcaaactgacgtggtggtggtcgccattattctttacgccattctcggcaagcttgccgattttagcgcgcaactgctggaacgcgtctggctgcgctggaacccggcgtaccgtcttcaggaggctaacgcatgaatactgctcgtcttaatcccgggatcccgctgttactcaatggggtcagcaaacgctatggcgacaatgtcattctcaatgagctggatttacatattcctaccgggcaatttgtcgcggtggtcggccgcagcgggggcggcaaaagcaccctgctgcgcctgttagccgggctggaaaaacccaacggcggcgaactactggcaggcgcgacgccgcttgcgcagattcaggatgatacgcgaatgatgttccaggacgcgcggttgctgccgtggaaaacggttatcgacaacgttggacttgggctgaagggccagtggcgcgatgccgcccgccaggcgctggccagcgtcgggctggaagaaagagctgatgagtggccggccgcgctttccggcgggcaaaaacagcgcgttgcgcttgcccgcgcgctgatccatcgcccgcgcctgctgttgctggatgaaccgctgggagcgctcgacgccctcacccgtctggaaatgcaggaattgattgtctcgctctggcaagagcatggttttaccgtgttgctggtaacccatgatgtgagtgaagcggtggcgatggccgaccgggtgctgttaatagaagaaaagaaaatcggcctcgatttgaacgtggatattccacgtccgcggcggttcggctcggcgaagctggcggaactggaagcacaggtgctcgatcgggtgatgaagcgcggcgacagcgagcgtgcgccgcgtttgtttagtcatggctaacttactttcccggcccacgcttcgctcggccgggctactaaatcgcacagcgctgtagccccggtaagcgagagcgccaccggggattttgcggccgttacgccagcgctttgctgatcttctcgaacagatcgccggagagattctccagccctttcagctgttccagcgccgcacgcatcttggcctggcgtttctcatcgtagcgtttgagacgaatcagcggctcaatcagacgcgacgccacctgcgggttgcggctattgagctcggtcagcatttccaccaggaactgataaccgctgccgtcttcggcatggaacgccgccgggttgctactcgcaaaggcgccgatcagcgaacgtacccggttcgggttgctcatcgtgaatgaacggtgcttgagcaatccgcgtaccgtctcaaccacattggccgccgggctggtggactgcaaaataaaccacttgtccatcaccagaccatcctgatgccacttatcgtcatactcctgcatcaaggcatcacggcacggtaactccgccgccaccgccgacgacagcgcagccaacgcgtcggtcatattgtcagcatggtgatactgggcttgcaccagcttatctgccagttcaacatcgccaaaagccagatagcgcaggcaggtattgcgcagggaacgtttaccgatatcggcatggtctacgcgatagctgtcgagcttgttggcgttgtaaaccaccagcagctcatcggccagttctttcgccagcgtacgggtcagcgcttcgcgcaccgccgcgatggcaagcggatcgatgatggcgaacagttcggcaatttcgttggccgacggcagcgttaaaatttccgcggccagcgccggatcgattttctcgtcgagcaggatcgcgcggaaagcgtcagcgacgtggataggcagcgacagcggctgaccctgctgatgacggttaacgttgagcttgatgtaggtcgccagcaggctctgcgcggcatcccaacgcgagaagtcgttacgcgcgtggcgcatcaggaacgtcagctgctggtcgctccatttatattcaagcttgaccggcgcggagaattcacacagcagcgcgggtaccggctggaagtaaacgttatcaaagacgaacgtctgttccgcctgggtgacatttagcacgtgatgtaccggatggccacccttctgcagcgggatcgctttgccttcgttatcatacagctcgatactgaacgggatgtgtagcggctgcttgtcggcctgttccgcggtcggcggcgtacgctggctgatagtcagggtgtactgctcggtttccgggttatagtcgtcatgcacggtaaccaccggcgtgccggactggctgtaccagcgacggaaatgcgacagatcgacgttcgaagcatcttccatcgcctgcacgaaatcatcgcaggtggcggcgctgccgtcgtggcgctcaaagtacaactgcatgcctttctggaaattggcttcgccgagcagggtgtgcagcatacggatcacttccgcgcccttttcgtataccgtcagggtgtagaagttgttcatctcaataaccatatccggacggatcgggtgcgccatcgggctggcgtcttcggcaaactgcagcccacgcatggtacgaacgttgttgatgcggttcaccgcgcgcgagccgaggtcggaactgaactcctgatcgcggaatacggtcagcccttctttcaggctgagctggaaccagtcgcgacaggtcacgcggttgccggtccagttatggaaatattcgtgaccaatgacgcgctcgatatcaaggtagtctttatcggtcgcggtatcggtacgggccagcacgtatttagagttaaagacgttgaggcctttgttctccatcgcccccatattgaagaagtcgacggcgacgatcatatagatgtcgaggtcatattcgagaccgaaacgggtttcgtcccacttcattgaatttttcagcgaggtcatcgcccacggcgcgcggtcgaggttgccgcggtcaacgtacagttcaagggcgacttcacgcccggagcgggtggtgaaggtgtcacgcagcacgtcgaaatcgccggccaccagcgcgaacaggtaacagggttttgggaacggatcctgccactggatccagtgacggccattgtccagctcgccctgcgcaacgcggttgccgttggagagcaggaacggatatttcactctatcggcaatgattttagtggtgaagcgcgccagcacatccgggcggtccagataccaggtaatatggcggaaaccttcagcttcgcactgggtacatagcgcttcgcctgactgatacaggccttccagcgcggtgttcgccgccgggctaatttcgttgacgatagtcagggtgaaactgtccggcaaaccgccaatcaccagctgattattttcttctttatagtcactccacggctgaccgttcacctgcagtgaaatcagggtcaggtcttcgccatccagacgcaatggcacatcagacgcagccgcgtgacgggaaaccttactctcggccgtgacaacggttttcgcggcatccaggtcaaaggtcaaatcaatatcgctaatcagataatccggcgcacggtagtcgtggcggtatttggcttggggctgttgtgtcataaaaaacctttagcgtgtctgtaaagtatcggctccagtctattcctgttgcgcagatcgcgctatgcagaatcttcatcttttcaacgttcaacacgaaaatcgctacatattgataacacatgaggcacgaaatgcgctcgacccggcgcaaagcttgtggtgtgatccgtgttcaatatattaaactaggcctcgcaaatgaccgtcagcgttaccgtcgagccatcgcagcaggacagcaccgggtattaaaggtatactccgcctccttttttctgctttggtttgaatggaacgccccagtgagaggatgctactgcgcaccatgacacaattcacttctcctgtactgcactcgctgcttgatacggatgcctataagctgcatatgcagcaggccgtcttccaccgctactatgatgtggaggtagcggcagagttccgctgccgcggagacgacctgctcggcatctatgccgacgcgattcgcgagcaggtcgaaaccatgcgcgaactgaagctgcgggacgatgagtatcactggctgtcctccctgccattcttctcgcaggactatctcgactggctgcgcgacttccgttacgacccaagccaggtcaccgtcatcaacgatcatggcaagctgaatattcgcctcgccgggccgtggcgagaagtgatcatgtgggaagtgccgctgctggcggtcatcagcgaactggtccatcactaccgttcaccggaaatcagcgtcgaccaggcgttggagacgctcgaacataagcttgccgacttcgccgacatgaccaccgacattgatatgtcggcattccgcctgatggatttcggcacccgccgccgcttctcccgcgaagtacagcaggctatcgtgcagcgcttgcagcaggagccgtggtttgtcggcaccagcaactacgatctggcccgccgattgaatttaaccccgatgggtacccaggcgcacgaatggttccaggcccaccagcagatcagtccaaacctggccagcagccaacgcgccgcgcttgccgcctggctggcggaatatccggatcagctgggtatcgccctaaccgactgcatcaccatggacgctttcctgcgtgatttcggtcctgaattcgctacccgctatcaggggctacgccatgactccggggatccgctggagtggggcgagaaagctatcgcccattatcagaaattgggtatcgacccgatgagtaaagtgctggtgttctccgataacctcgacctcggcaaagcagtcgaactgtatcgccacttctcctcgcgggtgaagctcagcttcggtatcggcacccgtttgacctgcgatatcccccaggtgaaaccgctgaatatcgtgataaaactagtagaatgtaacggcaagccggtggcgaaactctccgacagcccgggtaaaaccatctgccacgataaggcattcgtccgcgccctgcgcgaagccttcgacctgccgccgattaaaaaggcgagttaatttcaacaaggagcctggcaggctcctttttctttattatttattgtcaaattatccctttatgatgcgaattctgcttgtctgatggaagatgacaggtaacatagatatccccccgttgaaggggaagagacttttttattggactatatagagagaatattatgagcgttgtgcctgtagccgacgtactccagggccgcgttgccgttgacagcgaagtcaccgtgcgcggatgggtgcgtacccgccgagattctaaagctggcttttctttcctcgccgtctatgacggttcctgctttgatcctgtacaggccgttattaataattctctgcccaattacaatcaggaagtattgcgcctgaccaccggctgctcggtcatcgtcaccggtaaagtggtcgcctcccagggtcagggccagagctttgaaatccaggccaccaatgtggaagtcaccggctgggttgaagatccggacacctacccgatggcggcgaaacgccacagcatcgagtatctgcgtgaagtagcgcacctgcgtccgcgcaccaacctgattggcgcggtagcgcgcgtacgccacaccctggcgcaggcgctgcaccgtttcttcgacgaacagggcttcttctgggtatccaccccgctgatcaccgcctctgataccgaaggcgccggtgaaatgttccgcgtatcgacgttggatctggaaaacctgccgcgtaacgaccagggtaaagtcgatttcgataaagacttcttcggtaaagagtcgttcctgaccgtttccggtcagttgaacggtgagacttatgcctgcgcattgtccaaaatctatactttcggcccaaccttccgtgccgaaaactccaacaccagccgccatctggcggagttctggatgctggagccggaggttgccttcgccagcctcaacgatgttgccggtctggcggaagccatgctgaagtacgtcttcaaggcggtactggaagagcgtgcggatgacatgaagtttttcgccgagcgcgtagataaagacgccatcgaccgcctgcagcgttttgtctctgctgatttcgcccaggttgattacaccgacgccgtcactatcctggaaaactgcggcaagcagtttgagaacccggtttactggggcgtggatctctcctcagagcatgagcgttatctggccgaagagcacttcaaagcgccggtggtcgtgaaaaactatccgaaagacattaaggcgttctacatgcgcctcaatgaagacggtaaaaccgtcgccgcaatggacgtactggcgccgggcatcggcgaaatcatcggcggctcccagcgtgaagaacgtcttgatgtgctggacgcgcgtatggccgaaatgggtctgaacaaagaagactactggtggtatcgcgacctgcgtcgttacggcaccgtaccgcattctggcttcggtctgggcttcgagcgtcttatcgcctacgtaaccggcgtacagaacgttcgcgacgtgattcctttcccgcgtacgccacgtaacgccacattctaatcgcgtttcgttaaaatactgacaaggtcggcgcaagccggcctttttttatgtcaattttcgtgagcgaatttcaacaaatataaacatcaaccttcacaatttgtaattatgttactcactatttccttacccttagtacgtagatttcgcaccttatgttaagactcaaatgaatacactgattgaattggctattttttaatcattctgcgcacattatgcaaaaacagagcctgagcgaaaataggaccgaattgagctaaaaaataatcaaatctgtctttagcgaaaatattcataactaattcatatagatatatatgagaaggtgacaatcttcgcaaagtggaacggaattttgattgagttcacaaagttcccaaaaatacataattagttacatgttttttctttttgtaaccaatttgcgatattggtagcattttccggctagcgaaacggcaccaccgatggaaagatgccttcagacaccaaactatcttcaatagttctgtaaattttcattgacggaatttattgctggcggtggcaagtgtcatataaaaaatattaatgagggtaataaataatgatgaagcgcaatattctggcagtggtgatccctgccctgctggtagccggtgcggccaacgctgcggaaatctataacaaaaatggtaacaaactggatttctacggaaaaatggttggcgaacatgtctggaccaccaatggtgacaccagcagcgacgacaccacctatgcccgtattggcctgaaaggcgaaacccagatcaacgaccagttgatcggttacggccagtgggaatacaacatggatgcgtccaacgttgaaggttcccagaccaccaaaacccgtctggccttcgctggcctgaaagccggcgaatacggttcattcgattacggccggaactacggcgccatctacgacgttgaatccgcaaccgatatgctggttgagtggggcggcgacggctggaactacactgataacttcatgaccggccgtaccaacggcgtagccacctatcgtaactcagacttcttcggtctggtggacggtctgagcttcgcgctgcagtatcagggtaaaaacgatcacgaccgcgttgttcgtaaacagaatggcgacggtttcagcaccgcggcaacctacgcgtttgataacggtatcgcgctgtctgcaggttacgctaactccaaccgtagcgttgaccagaaacgtgacggcaacggtgacaaagctgaagcatgggcaacctctgccaagtatgatgctaacaacatctatgctgctgtcatgtactcccagacttacaacatgacgccggaagaagatgaccacttcgcgggcaaaactcagaacttcgaagccgtagttcagtaccagtttgatttcggtctgcgtccgtccctgggctacgtgcagactaaaggtaaaaacctgcaggctcgcggtggcttcggcggcggcgatgcggacctggttaaatacgtagaactgggtacctggtactacttcaacaaaaacatgaacgtgtacgcggcgtacaagttcaaccaactggacgacaatgcctacactcgcgcagctggcgtagccaccgacgaccaggctgcggttggtatcgtttaccagttctaatctgtagtacaccccttcgtgatatgcctaaaaagcaggacttcggtcctgcttttctgcgttactaagacgaagatcgtaacttgcaaaaaccttctcgctttttgtcgcaaacggttggcaatttgtaaatctaccgttaccctgatagcggatttccctcagtaatcacaatggaacctcgtcatgtttgagaacattacagccgcccctgccgaccctattctgggcctggccgatctgtttcgtgccgatgaccgcccaggcaaaattaacctcggaattggtgtttacaaagatgagacaggtaaaacgcctgttctgaccagcgtaaaaaaagccgagcaatatctgctggaaaatgaaaccaccaaaaactacctcggtattgatggtattccggagtttggtcgctgcactcaggagctgctgtttggtaaaggaagcgcaattatcaacgataagcgcgcccgcaccgcccagaccccaggcggcaccggcggcctgcgcgtagcggctgatttccttgccaaaaacaccgacgtaaaacgagtatgggtaagcaacccaagctggccaaaccataaaagcgttttcggcgctgccgggctggaagtacgcgaatacgcttactacgatgccgccaaccaccagctggatttcgatggcctgctggccagtctgaacgaagcgcaagcgggtgatgtcgtgctgttccacggctgctgccacaacccaaccggcatcgatccgacgctggaacagtggcaacagctggcgcaaatgtctgctgaaaaaggctggctgccgctgtttgacttcgcctatcagggcttcgcccgtggtctggaagaagacgctgaagggttgcgtgcctttgccgcgctgcataaagagttgctggtcgccagttcttactcgaaaaacttcggcctgtacaacgagcgcgttggcgcctgtactctggttgccgccgatcaagacagcgttgaccgcgcgttcagccagatgaaagcggttatccgcgccaactactctaacccgccagcgcacggcgcctccgtggtagcgacgattctcagcaacgacgcgctgcgcgccatctgggaacaagaactcaccgatatgcgccagcgtattcagcgtatgcgcttactgtttgtgaatactctgcaggaaaaaggcgccagccgcgactttaccttcattaccaaacagaatgggatgttctcgtttagcggcctgaccaaagagcaggttctgcgcctgcgcgaagagttcgctatttatgcggtcgcatccgggcgtatcaacgttgccggcatgacgcctgataacatgtcgccgctgtgcgaagccatcgtcgcggtactgtaattctcagccctgacgcataagaaaaaggccgcagacgcggccttttttatttcattgaggtcaggcattaccagaccggcatttcatcctgcaggaacggattgtgaaggcgctcatatcccagcgtcgacaaggggccatgaccggggataaacgtcacatcgtcgcccaacggcaacagtttacgtttaatcgcatcaatcagttgtccatggtcgccgcgcgggaagtcactgcgccctactccgcctttgaaaattacatcgccggaaatcagcagacgagaggcatcgtcaaagaaaaccacgtgccccggcgtatgaccaggacagtgcaatacctgcaaagcgatattgccgacggtcaccacatcgccttcatttagccagcggtccggctgcaacggctgacactcatccagcccgaacatacggctttgcgccggcaatccttccagccagaactcatcttctttttccggtccaataattggcacaccgtaatgttgcgccagctcggctgccgcgccgacgtgatccaggtgaccatgcgtcaacaggatctgcatcaggctgacgcctgccgccgctacttcttccttgatgcgctcggcatcgccgccgggatcgaccagagcggcaagccgggtttgttcacaccaaattaaagaacagttctgggcgaacgccgtgaccggaataatacgatagttcatgatgctcctttcgttaccagtgccgtaccggaccggtatcaatatgcacaaagttgctacgtgggtagtatcctacaccacctgagcgcatagataacgccgctttgcgaatattgcttaaggcaacgccttcaatgtggaaatccatcgcctggcctttggtgtgatagctgtgtttcgccacaccacggcttcgtgcgcgaagttcatcgttggtatcaacagagcgataaccggagatgagctggacaggcttgttggtgccgagtagtccctgcaggcggtaaagctgatcgaacaatcctgggtcaatagacttaattttgttcgcgcggaaatcacggaaaaagtggttaagtcttgctaattcatcctgaatatagcctctaccatcgaaaaactccgccttgagtgattcaccggtgtgcaggttattcagcgtcaaaatacgcggtcgggggtcgagagggtggcaaatgccggcgcagggagaatggcggcagcaccgagggcagcgccacccaacgccagcaatctgcggcgattagcgtcaaatttgtccatgataatcaggtctacaggtaaatgaatcgtaatatacttttccgctaaaacgtatttggctggcggcatactaacgctccattaccgctaataaagctcagcaggagagcgttttcgtattgaccgccgcaacacatttttgcggattatatgtatatgcacttctggcgcacgaaaggcaccttaccgggcattattgccaacgtcaaggcagcctcaccccaggaaatacgggccttgtagacgaccagggcccgatttcgttcagtgctaggacaacatttttcgcagaactacttcatttacctgattaattgttccgcttttggcagaatttgtgcgctggatcgcgcggtgagatcgtaattgtaaatatctgttcgatattgtgtacgtccatcagcgccaacaaacgcagtcaaataatataaattaaccggaatattttgccgaatattgacgtaacgcgtatccccctgcttcagggcatcggaaatgcgtgaatcattccagcccgcatcctgcaatagcatattcgccagttcagatgctttattgacgcgaacacagcctgagctcaacgcgcgaacatctttctggaacagattgtggttcggcgtatcgtgaagataaatagcatccgagcttggcatattgaacttataacgccccagcgagttgcgcgcgcccggcgcctgctgaaaacggaacggtagattcttctcggtgatagtagaccaatcgacaccatagggatcgatagcttctttgctgttccagccgcgcatcaacgtataaccatgctgctccagatagcctggattgttgcgcaccttcggcagaatatctttgcgcgccagcgtcggcggcacgttccatggcgggttgaccaccacgttgttcaacgcgctgctcatcatcggcgttttacgatccggacgaccgacaatgaccctcgatgccagcacctgactgccgtcctgatagtagaccagcgagaacgccggaatattgaccatgatgccggtggacaatttactcggtaacaaacgcagacgctggatattcagcgccagcaccccggcacgctgtgccgaagagacattcagccagtcgcgggtggactggccgatgacgccatcagcgcccagcccctgccaggcttgaaagcgcttaacaccctctaccagttggcgatcgtaaacgccgcgcgcggcagattttgctttcgatttcggtttcgccgatgggctaaccacatcgcccggtagggcgattttcgtcgaatcatccagcataccggtacgctgcagaatttcacgcagcgcgccaatatcgttactccactctcccggacgtaacgaggcattgctggtcagttgcggccacggacggttatccgccaccagcgtcagcagcgcctgatgcattgcttcatactgcgaatgttgtggggccagtccggcaataaattgcgctaacgaaccgttatccagcgccagctgccactggttaatcaccgacagcggcggcgtcgtcattttgtaaggcgttgagccatacagccaacgattcccctgcatcggaataccgctaataaaatgcagatatcccatcatagcgtcggagagcacaacatcacgggccataccgctgacggacggatccgtcagtagacttacccaggtagtgaactgcggctggaaaccggcgatagcgacctcagccagctgctgctgaaaggcctgtaccgcttcgcggttctcccacatgggtttcatgtcgcgggcagcatacagcgccaccagcgggttgatataaaccggatgataaccagacggcagtaaggcctcgatttcagtgcggcttttcgccaccgcatccgccgccagcggctgctcgccggccatttgcgcgaccgcagcggattgaccgtcgttttgtactaatgccgaagaaagatcgcccaccgtcgcagagctatctgtgggtatgacttcaggctctgcggcctggacattgaacagcggagcaaatgcaaaagccaggctcaagctgagcactgacaattgacgaccataccgtttttttagcaacatcccttgcccctgttgacacattgccgcccgccaaatggggctttctctcagtatataaaggcgaaaacgcttttgccttgccaaatgtaaagaagtttaaagatcacatgttgtaagaatactgtacagaaaaacaaaaagggcgacaaattgtcaccctttttcctattaatcgacgccctttcaggaggcgtcagcggttccaggcagcgcttccggcaccggcgcggcaaaaccgcgcagaccgacaacgtgtacgtgttcgtgattattaaacactttacgtaccagtttataggtagtgcctttttccgggctgatattttccggcgccgcgataatcagctgcatctccagacgttcacacagttcgaacagcgtggcgatagagcgggcatcaagacgcgcagcttcatccaggaaaagcagacgacaaggcgagatatccttaccgcgcaggcgacgggattcatcttcccagctttgcaccaccatcaccagaatcgacatcccggtaccgatcgcttcaccggtcgacagcgcgccggactccgcgcgcagccagccgtcggaaccacggttaacttccacttccatctccagatagttgcggtagtcgagcagttcctcgccgatggtttgcggtgtacgctgccccatgtcaatctgcggattcaggcgctgatacagtttagccagcgcttccgagaaggtcaggcgattgctgttaaacagatcctgatgctgctcatgctgttcagagagcacatcaagcagcatcgagtgagtctctcgcacgttgacgttcagacgcacgctgttgacctggccgaacgacacgctctgcagcccctggttgagcatgcgaatacggttctgttcacgctgaatggtcttgcgaataatattcgccacgctgcgggaactgatggccagcttctgttcacggtttgtcagctcttcggtcagacggctgagctcgatttccatctgctcgatcgcttccaccggatcgtcggtgcgaataatatcctggcggatacgctcgcgcaggtgctgataaacggcaacgaagaactgaattttgcgctccggacgtttcggatcttccgaaatacgcaggacgtcgcgcaggtgctcgttatcagcgaccgccagacgcagcgcgcccagcgccttatccgacatcgaacgcagttcgtcggcggagagataggccagctcacggcggtgtagacgacgttcaacgccgttgtctttcaccagacgcatcaccgcgcaccatcccgctttagcgctcaccacctgctcgcgcatttcgcagtaatcacgttccagcttgcgcagtttgcgggtcaggttatccatctccgcttcgcagaaggtcaacgctttctccagctgattacggcgggagcggttgttgctcagctgcatatgcagctcatcacgacgcgcacgcgcacgctcttccgcgccgacatcggcacgtacgccgatatcctgcagctctttatacagatcgttgagcagctctttcttggtgtcatacgagcttttcagcgacgccagcacctggttgtactggttcaactgcgcaacgtggctacgcatcgcttcgcgagcgcggctacgttcggattctgcttgttgcaggcgctggcgcagcttttcgttgagatcgctgttgccgctgagcatctccgccgagtcagagtagctgaagtgggcgcggcgctgcacgacttccgccagcgcgaaagcctgctgacgcgcatcgcgctgcatttgctgtgagtaggcatagtcttctttcagctgttcgaactgttccgggtcgctctgcagtaccgagacgatcggttccagtttcgccagctgattgccatgctgctggataaagcgcgccgcttcctgcgcttcgtccagtcgttcctgaatttcatctacgcgatcggccagcgtctcatcggccagcagattcagacgcggcagcaggcggttaagcgccgacacgccctctttcgcctgctcatactggacgcggttctgctggttatcactttcatgcgcattcagcgcacgctcgagttcgccgcggcggctattgagtttacggatctcttcttccggatcgtcatcgaaggcaaccgccagatggctgccgatgaagcggctgaaggcctgatgcaggcgctgcgttttctgcacatcaaacgacagcgtagcaaaacgctcagagagactttcacgctcggcgtgcagcgtttcgatgcggttttcacgggcggcgcggccaaacagcggcagcgtcgggaagcgcgaatagcgccactggcggtcggcaatcttcaccaccaccgctttttccagctcatcgacgctgaatacgctgtcatcgaaggactgcggatcgccttcgatcagatacaggtcttccgggcaatcttccagcccttcgagctgctccgccacctgcgacagatccggaaccacgatcgcatggcgcgatgggccatacagcgcggagaagtacggcgcatcgtcgaggctaacgtcgtcataaatttccgacaacagtacgccgccaaagcgctctgccagcgcgttcagacgcgggtcttcagagccgcccggctggctgagacgttcgatttcttcgtcgatggcgcgcttgcgggcgccaacttcatcgcgctcaacgattgcttcgcgctcgcgctccagcaattgctgtaggtattcggtaacgtcctggcttgattcaaactgttcgccgctctgctcgcatagctggttgaggctgttttgcgccgccagccaaatcggcgcccggcgcatcagcgtctgggtacgcgattgcagttgctccagctcctgacgcagagccatgcgctgctcctgagcgttagaaacgctatcggccaatgaggcgatgcgcgcttccagctcctgatgcagcgtttccaaatcgtcgatatcgtagcgtttaccctggcgcttacagaactcggccagctggcgctcggcgtcctgttgttcacgcaggcgctgttccagctcgttgagacggctacgcagcccatgagcctgctccgccaggtgacgctggttgacaccgtcgcgtagtaattcacgcgccacatcccaggcttcattacgcgccagcggcccgttgatcgccgcaaccagctgatacgcttgttcaaactggctgtgcgcggtttgcgccacgctcattttctgttccagcgacagcattttttccgtcgcttccagctctttcgcctggaaagtttccagccattcgtcggcgctgtcggcggttaaatccggcaggtggcacagcgcgcgcgcgcgctccagcgcctgtagcgcctgattgtactgaatggcgcgagtctgctgcacgtcaagcgcctgctggtaatcggcgagctggcttttcagctcatccacttccagttcggcggcctcggcgcgggcttcgttctcttcctgctggtcggcggcttccgccactacttcattttgctcttccagacggatctgcagttcgtcgagatccgcctcgtagcgctcgattttttcttgctggcgcagcgcggtttgtaccaggttcaggtgatcgctggcggcctgataatcagcttccagatcgccttctgcgccgttgtgttcctgcaactcgcgagccatatcgacatgtttgtactgctctgccgccagctgcgaacgcgaggtaaagagctcgcgacggtactccagcgctttatccagatggatacgccgctcgttggcgtggcgcatgtagtccgccgccacgtagttggtggcttcgctgataaggtgtttaaacagatcgcgatcggactgggtaacacgaattgcttccagggtcatacggttttcacgcagcgccgcttccatatcctggaacgccttacgcacgccgctgttttccggcagcaggtaatcgcgcagcgagcgggtaatggtgctggagatcccgccgtacagcgaggcctctatcaggcggtagtatttgctacgatcggatgctgaacgcagacgacgcgccaccacgcccaaatcaaacatcagcgagtgatattcggtaatcgagttgaactgtttgaactgcaccccttccatcgcgtcgagcttgtctttcagctcgttgagactcacgacgcgcgcctggcgctcgttgagcgtttcggtcaacagttgggtcggctggatcgaggttggcaacccctggatggcaaatggcttaatatcgactttacggtcgcgcccggcaacctgctgcagacgcacgccaacgaccacgcgctggtggcgcgagttgatcacatcaagcacagagtaacagacgccagcgcgcagtttaccgtgcagacctttatcacgcgaaccgctggtggcgcccgcttcggtggtgttacggaagtgcaacagggttaaatccgggatcagcgccgtgacgaaagccgccatggtagtggatttacctgcgccgttacccccggaaagggtggttaccagctcatcaagatcgaaggtccgggcaaaaaaaccgttccagttaaccagcgtcagcgagcgaaacttaccgcgttcaatcattattcttcctccccgctatccggctgattctcttcattctcatcattgagctgcaggtgattctccagcgccatcgcttcgccgtcgcggatcatgcgcagctgcgcttcgcgcggatcgtcgccgacgcgcacgtcagcgccaaagcggaacaccgattcggtgatgcggaatttactgctgtcgtggcccataaaccacaccataccgaggcggcgcaggcggttgagggatgcgcgcattttttcctgcagcttctggcggtcaaggtcggaaccggtggaacggttgttgaccagcttcagcaatttgctttcatccgccagcgtcagcagctcatcgtagagctcctgctgggtgaagatgccttcattagccagacgctcggggctaaggtagaggtagcaaagaattttaccgaccatcatatccagctctgacaataccgaacgcgggatcaacgtcgtggagcgcgggcgcaagtagaagaacccctccggcgcgcgaatcagctcaacgttgtagcgcgcgtaaaactcttccaggtaatcctgaaaatccatcaaaaatgcgtgattatccagctcatccaggccaatgtgacggcccgcacgcagggcgctatccagcgccggaaataacggattggccaacgcctgcgccagcttagctggcatcacttgttcaatatttgtcaatgacatgcgcctgtaccttggctccgtaatcattaatcggctgccattttgccggcagtccggtgaaatctgcctgggcgacgcccagctgtaccgcctggtcaacaacgattcgcgcgacgtcaaagtgacgcgcacgcggatactgcgccagaaactctcgcgctaccaggccgagatccagcggcatccccttctctttgtaaaccgccagctgcgcttcaatcagcgcggccagctgctcgcgaatttcgttgaactcttcgaattcgaggtctgccggcaactcaccggtgacttcttcatcgcgcagcgccatttcttcatcgcgcatatccagcaaacggtcggcgctggcgtaggtcagcgcccacggagcgtcgaagtaagtctgtaccgactgacgcaaacgctgggcgaaaacgcggtttttatccatatcgatggcggtacggataaatttgtgtacgtgacgatcgtaaccgatccacagatcgatagcctgttggccccaactgacgatacggtcgagcttgctttgcaggtcgaacaccagacggtcgacaaaatgcagatcgtcgcgcgcgatggtggcgtcctggatacgcagcaggttggcctgcagcttatcccccgccgcatccagggtatcctgcaattcgcgcagggtgccggaggtttcggacagcagcagttcgcagctggaaatcgccgcgcgccagtctttgttcagcaactgggcgatatcgtctttcacctgctgctgctgctcatccatgatgcgttgagtcagatcgatactatcgaagatttccgccaccgaatatttcagcggcgcaaagacgttgcgatgccagtggaattcatccccgccctcatcggctgaatctgcagcccgtttcagttcgccggctacaatcgacagctgcatcgacaaacgcagtgtggaaaattcgcgctggcgaatatagtagtcggtaatgccaatacctaacggcgtcaggcggtagatcgcatttccttccgttatttcgctggtaaagcggttcagcagacgctggcgcaccatatcgttgatggcgttattggcgcgctggctgatggtttcgctggtctgctcaaacgcatcactgacgtggcggaacgcgtccaccagttctccctcggtcatttccccttccagccgctcgccgttcagcgtggcgacagccagcagaaaagagagtctatcgaccggcagcgagatggaaaaatcatttttcctggcccaggcaaccagttcggggactgtctgggaaaattcactcatagtttatccttgcatctgcggctgtgcgcctggatctttcttaagcgcagtgacatgaatataacggcccaggctgatatacggctcctggcgacagtagcgcgtttccagctccagcagcgccgcaaagctgtcatgctgtttacgtttctcacgcagataatcatgaaatacccgcacgccggttttaccggttatctgccaaccgagagtttccagccagccgtacacctgctgcggatcgcgcggataatccggcgacagcgtgcgttttttctttttcggcatgccgatttgcacgtagtcgaagtttccagcgaccatattgtgcatcagcagaccgttagcattgtagaacattaacgacagcgcgccgcccgggcgcaataccgaccacagcgtgcgcaacatttcctgtggttccgcgacccactcaagcaccgcatgaaacagtaccagatcgacggggctttccaaatgctgagcaatatcctgcgccgcgcattgtacaaaatgcatgttgtcgatcacacctttatcgcgggccgcctgttgagcgcgcgtcaccatttcggcggaaagatcgcatagcgtcacgtggtggcctaattccgcaacgcggatcgccgtttgcccttcgccgccgccggcatcaagtacccgcaatggccctggccccatctgcgcgagcagcggttccagatcctgccaaaggatcgcctggcgcagttggcccttggtggtgccataaatattgcgcgaaaacttttcagcgatgtcatcaaaattgcgatcctgcacggacgactccacaagccaacacaaaaccgctattttgtcatacccacggcgataatgaagcgatctgttataagatccgtatataactttggttatatggttaaaaaaggaaccattcgggatgcttttcacactgaaaaaggtattgggcggcatgatgctgccgcttcctctgctgttattgctgatggcgatcggcatcatcctgctatggcgcagccgttttcaaaaaaccggcaaaacgcttgtcaccctgagctggttgttgctggcgctattaagcctgcagccggtggctgacgggttgttaaaaccgatcgaaaaaagctacccgacctggcgcggcggccaatccgttgagtatgtcgtggtgttgggcggcggctatacctggaatccacagtgggcgccgagctccaatctgatcaacaacagtctgccgcggctggcagaggggatccgcctgtggcgggaaaacccgggcgcgaaaatgatctttaccggcgcggcggccaaaaccaacccggtgagcactgccgaggcgggtgcgcgtgtcgccgaaagcctcggcgtaccgcgcagcgcgattatcgtccttgatcgaccaaaagataccgaacaggaagcggcagaagtaaaaaaagccatcggcggcgcgccattcctgctggtgacatccgcctcgcacctgccgcgagcgatgatatttttccgccatgccggactgaatccgttaccggcgcctgccaaccagttggcggtggaatcggcgcttaacccctgggagcgcgcgctgccgtcgccatattggctgatgcacagcgaacgcgcgatttacgagaccctgggacgaagctggcagtggctgaagggagcgtcaggcgatccagggcaggattgatttcgcggcaagcgagaaacgggcgcgatcgaagcgcccggtattcaccagactttcgacttcatcccataactgatatagccaacgccgccagacgaaagactccgctaccggcgcccgctgcaggtagcgccatagtaactgctcccctgacccgccatcggcgaggcggaacagttcgtactcgcgcggcgcccacagcatcatccccggaccgaccatcgccaacagctgatcgctgcgcgcgtctttgagcatactacgtagcgtaaagcagccatggaccagtacgcagttatcgttgaaatcactaaacagctgcggcaggctttcacgactgcggaataaaatgcgcttatcctgcatcgtcagcccggtgtcgtgatagaggttgagcgtgctccacagcatttctacccgctggcgataccagtgcggccagaggttttcctgggtgctatcgaccatccccacacagccgccgctatcgtgacgatgccacgccagtagcccctcgacaatctgatcctgtagctgctcccaacgctcgggcgtacgcgccggcgcctccactgaaacgccgcgtaaccgttcaatcagcaatacgtcaggtccaggatgttcttcatgcgtcaagacgccgtataccaccggcatacgaacggtgccgctacgggcaagcagcgaaattttccacgccagttgtcgtgcaacgccgggcgtggtaaagcttttcgctaacagaggcattgggtttccctgcgcatcatacagcgaccatagcgctgacgagggtttctcgctaacgcactccacgcggcttagcttctcgccaagcaggtggctcagttcggctcgcaactgttccatcatcgataccctcatgaagactactgttttcataatgagcgtctgggggcgacttgtcagcggataagatcaaaaatgggctaattagcggcagaaatatgtcccctccaggcgaaggggacggtaaggattaacgcaactcggcgcggacgcgctccagatcttccggcgtatcaacgccggtgccaggaaccacttccgccaccgcgacgtggattttttcgccataccatagtacgcgtagctgttcgagcatctcaatttgctcaagtgggcttggcgcccagctgacgtagcggcgaataaaaccagcgcgataaccgtaaataccaatatggcgcagcagggaatcgccaatttcttcgcgcgactttgcaaaacgatcgcgatcccacggaatagtcgctcgagaaaaatagagcgcatagccgtcggcatccatgaccaccttgaccgcattcgggttaaatgcttcttcggcatcgtggataggcaccgccagcgttgccatcccgctggtgctggccgcgaggttttccgctacctggcgcacgatcgccgacgggatcatcggttcatcaccctgaatattgacgataatagtgtcatcgctgaaagcgcatttttcaacgacttccgccagacgttcggtgccggactggtgatcggcgcgggtcatgcaaacctcgccgcccgcggcttcaaccgcacgcgcgacatcttcatgatcggtggcgacgataatgcgatccgcgccggattcgcgggcgcgttccagcacatggacgatcatcggcttaccgttgatatcctgcagaggtttccccggcagccgcgtggaggcaaatcgcgcgggaataatgacgacaaaactcatggctggctctcttctaccgcgagcgagcgcgcttcgttttcaagtagtaccgggatcccttcgcgcagcgggaaggccaggctgtcggctttgcagataagctcttgcttatcctggctgtagtacagcttaccgttacaaaccgggcaggcgataatttcgagtaaacggtgatccatgattcctcctgatggaccgaatagatttggcagcagcatatcacaggatggtagcccgcgtatcacgcggcatcaacaccccaaccttgccgctggttagcaaatagcgccgcgggtaactggcgcagcacaacctcttctgccccttgccagcgcgcaaaatcattaattgcccgctggagtccgctttccagtccggcagtcactttcacgccctcttccagccacagcgaaaagatctccagcacgccccctttacggtgcaacttgctgtccatcctgccaaccagtttgccctgatgcagcaacggtagcacaaagtagccgtattgccgtttcggcgctggggtataacattccagccgatagctgaagttgaataactgctcggcgcgtttacggtcccagactaccggatcaaacggcgagagcacggcgctgtggctggcggttaacttaccgccggatgccgattccagcacagcttgcagatcgcgatgcagccacatctcacccagttcctcaaccatcaccggcaccaccagcccctcatcctgccagcccttcagcagcgccggtaatgcaggctggcgtagacgataataatcggccagccactgtgggcgaaaaatgcccaggctgcgcgcgctgttgcgcagcataatggactcggcctcctgacgggaaagcgcatcgcgcccatcatcccagtgcggcatcgcccgatgggttaaatcatagacgcgatgaaagttacgccgctcaacgaccatcagtttgccggcggtgaacaacccttccagatgacgtttatgtggtttccactcccaccagccgctggcgcctttacgtggatgggaaaaatccgccgagcgaaccgggccattttgcgcgatatgcgccagcaactcttctatgctggcggcatgctcgagcatccactctttatggtatttccagcccatcttgtcgggattcaacatccggtggcgcacgagggcgaaatcgctgcgtggcaaaaaacaggcttcatgcgcccagtattccatgagttcgccgctacgcaaggaatcatccagccagtgctgcggataactaccaagacggctaaacagcaccagataagggctacgggcgaccacgttaatcgtatcgatttgcagcagcgacatctgctggatggtggaaaggatgtcagcctggcgagcgcgacgccggggctttttcagtaacccctgcgccgcaagatgaagatggcgagcctcttttagcgacagttgcaataccgacatgcaggttctccgtaggggattcaagcacagcggcgagcaaagccagcacgcaggttaacgttgcgccagcgtcactaagtccgcgagcaaccgctgtgcgcgatcatcggtcattatggcgtcaaccggcagataccaccagttagcggcggcgaattcacggcattttaccgcgtctttctcggtcatcaacaacgtctgcgacggggttaccaatgcggcgacagcgctttgactcagcgcctgatgatccgccagcgccacggttttcaccggccgcacgccgcagttttctagcgtcgcgaaaaagcgcggcggatggccaatgccggccatcgccactatgttatcgagggtcgcaacatcgcgacgctcgccggtaagcaggttcaccgccatgccgggacgcaactgcatcgggatttcacccggacgggcgacgccgccgttgacgataacggcatcgacgctttgcaaacgggatgcgcgctcgcgcatcggcccggccggtaaccaccagccgttgccaaagcggcgtacaccgtcaatcacgacgatttctcgatctcgcgccagtttgtagtgctgcagaccgtcatcggtaacgataatttgcaaatcgtgggcggccaataacgcttttaccgcgtcgctacgtagcggagaaaccgctaccggcgcgccggtacgctgatgaatcaacaccggttcatcgcccgcctgcgccgtactggtcgcgtcattcagaaccaacgggtagctgtcggctttgccgccatagccgcgagacactacgccgacgcgaataccgcgctggttcagctgttccaccagccacaccaccaccggcgttttaccgttgccgccggcggtcaggttaccgaccacgactaccggcaccggcgcgcgccaggcttttttccaccccagcttatagctgaggcgaatgaaagcgctcaccaggccatacagccaggagagcggcagcaatagccgccagagcggcgattcgccggaccagatgcgcgctatcattgaccgaattgcatcttgtgtagctgcgcgtaaacgcctttatgctccagcagatccagatggctaccgcgttcaacaatgcggccatcttctaccaccacgatttcgtcagcctgttcgatagttgacaggcggtgggcgataaccagtgaagtgcggtttttctgcagttcatccagtgccgcctgaatcgcacgttccgactcggtatccagcgccgaggtggcttcatcgaggatcaggatagggctgttgcgcagcagcgcgcgcgcaatagcgatacgctgacgttgaccgccggagagcatcacgccattctcgccgataatcgtgtccagaccgttatccatcttgttgataaagtccatcgcataggccatacgcgccgcttcttcaatttgctcacgggtgtactcttccgtacgcgcataggcgatgttattagcgacggtgtcattaaacagatgcacattttgcgaaaccaacgccacctgatcgcgcagggagctcagtttgtactcgcgcagatcgtgaccatccagcaggatctgtccctcgtcaacgtcgtagaaacgagtaatcaggctggcaatagtggatttacctgagccggatcgcccgaccaatgcaacggttttcccctcaggaatactcagattgatgttacgcaacgcggcgacttcgcggccaggatagctaaaggtgacgttgttgaattccagattacctttggcgcgctcaatcacgcgagtgccttcgtctttctcctgctcggaatccagaatggagaacagcgtctgacatgccgccatcccacgttggaactgcgcgttgacgttagtcagggatttcaacgggcgcatcagcgcgatcatggaagaaaagaccacggtaatcgtacccgcggttaaagtttccatcacgctggggaagctcgccgcatagagaacaaaagccagcgccagcgaggcaatcagctgaatgatcgggtcggagattgaggatgcggagaccattttcatcccctgcaggcgcatcttattactgaccttgtcaaaacgcttagtttcgacttcctgaccgccgaacatcagcacttctttatgccctttgagcatctgttccgcgctggtggtaacctgccccatagtgttctgcatattcttactgatattacgaaaacgcttcgagacgacccgaatcgcgactgacacaatcggcgccagcacgataagaatcagcgacaattgccagctgtaatagaacatcatggcgaacaggccgataatcgacgccccttcgcgcacaacggtaatcaaggcgctggaagaagatgaagcgacctgctcagaatcataggtgatacgcgatagcaatgtcccggtggactgtttgtcgaagaaggcgacgggcattcccatcatatggccgaacaggcggcgacgcatcgtcatcaccactttgccggaaacccaggagatacagtagctcgagatatagctggtaatcccgcgcagcaccatcaaaccgatcactaccagcggcatccatatcagcactgagcgatccgttttaccaaaaccatcatccaataacggtttaagaagcgataacatgaaggtatcacttgccgcgttaagcaccaacgccacggccgctacgattagcccggctttaaacggcgctatcatcggccaaagtcggcggaaggtctgccacgtggagagatctttatcgttctgcattcaataaaccagcttgtgttgaaatagccgcatattctacccgttctgcgcgtcctcgccaaaccactgatgataccaacgaggtaaaagttgatctcgtaagctctggatttgccaaccatctggagaaaaaataagcgtaatttgccctgagtgcggagtatcaaaccagagatacccctgttggcgataacgctgcacgaccttactggaaggcatcttccaggcattgtaccgcgatgccgatgcgatggccgcctctcctcctacccgctgcagtaatgtcagactggatgatgtattactaccgtggtgcggaacctgaataagtgtagacgtaagatgctgccagtaatgactcatcattttctgttcggccggaatttcgatatcaccggtaagtaaaacgctgcgcttgccgtcatcgaccctaaccacacaggaaccattgtttcctttatgctcacccgcaggcaacggccaaagcgcctgaaatcgaagccctcgccagcgccaggtttctcctctgtggcagggtagatgtccacgcagcttaagcggactgcgaatcacgagatggggccacgccttaatgagcgcattcagaccaccgcgatgatcaagatgttcgtggctcaggatgaccccttccggatggagaccccgccagcgcaaccagggcacgatgagtcgctggccactatcgcctcccggccaggcaggaccggtatcgtacagcattgccgccccttgacgctcaatgactatcgccaacccttgtccgacatccaacatcgtcacccgccactcgcctggcgttgctggacgccagaagggccaactgagtagcgccacgccgctcatacaaagtaacggcatctgacgccaggcctgaaaacgccataccaggagcgccaaccatggcagtacactgactgctaaccaacgatcgttgagcgataaccatccgggaggcaaatggcgtaagaaccagaataatattgccagcagacgatcggcgagttgccacaaccccatttcaaataacgccgggccgctaagatgcagcaacatcgccgctaaaatgaggggcacgaccagcaacgtcaccaacggaacggcgattaggttagcaatcaatgaagtcaggctaataccatgaaaaagggctatctgcagaggcgccaacagtaacatcaggccgcattgtagatgaaccaatgccagcagttgccgccacggtgaacgacagcggtgccggcgaagcggcgcaagctgataccagaaaatcaacgcagcaaccgcaaacaccgataaccacaggctttcagagatcaccgccactggatcagcacacagtattgccgcaatacaacagcaaaaaatttgccacggcgaccagcgcctggcctgtagcctcaacaaacatcctgcggttaaggccgcacaggttcgtagtgccgggggctgcatgccggtaagccaggcgtaaaacagtgcacaacctaacccgacaagcagcggtatccgccagccgatccagcggcacggaagaaagaactgtattccgcgaaccagtaaccagccaagcgacgcgcccaaggcaatatgcaggccggagatagccatcaaatgggacgttcccgtctcctgcattaacttttttatctcatccgcaaccgcgaggcgctcgcccattcctaatcccagcattaccgttctccacggataatcagagagggtgcggttcaacgacgtcagatagcgagcccgagcgctacaacgtaaatcgattgcagaggcgcttagaaaacgtccactcagcggacggtgttgagcaagggaataacgctggctatcaaaaccgccttcgtttaactgcgcatgcaccggacgagcgcggaacgtcatcagccagcgctgcccggcgcaaccgggttcaggtagttcccggccgtagagagtaatcccaacagcgggatataaacgccgcccatcaagacggattatcttgccttgccaggtcgtcaggccatcacctgcgaccagttcaataacggcctgtcggttgcgaccgggaatatgttcagtgggccacagcgcctgccgggcatgtaatataccccatacgaacaatagcaacgtcactgcgacgtatgttgtataaggtctacgccgtggtgcaatgatgagcgcagcgccgataacacaccagacgcttaccacattgggtagcaccggtagccaaagcagcggcgaaattccgataatggcgcaacctgccagatgtggtaatcgcataacacctccctgttatcggggagtgtcagacaatccagcgccgtgctcatgcgtaaaagattgggtttgcgtcacgctgtccgggaaaggttggtgcttgctatcagataacaaaaattttgcgagcggacacggaaaacgggcataaaaaaagcacctggcggtgcttttttattgagtaagtctttgcctgatacggtaaaacttactcttcgtaaatattggcgcggtcgcgtagttctttcccgggcttaaagtgaggaacgtatttaccttccagttcgactttatcgccagttttcgggttacgcccggtgcgaggtgctcgatagtgcagagagaagctgccgaaaccgcggatttcaatgcgctcaccttgagcaagcgttgaggccatatgttccagcatttctttaacagcatcttccaccgctttcgccgggatatgagattgctggctggcaagtctttctatcaattctgacttggtcatttttcctccggtttccttcaaggcaaagttagcttacagcttaaacaagggcggccgtagccgccctttgtgcttgattacaggacgaatcctgcaatctgtcaagtaaactcgtcattattcaggccgttgtggcctgaataactaagattactcgcctttagctgctttgaaagcttcagccattgcgttgttagagaagtttgcatcttcctgtttgttaacagttgcgattgcatctttctcgtcagcttcgtctttcgcacgaacagacaggctgattgcgcggtttttacgatcaacgccggtgaatttagcttcaacttcgtcgccaacgctcagaaccagagttgcatcttcaacgcggtcacgggatgcttcagaagcacgcaggtaaccttcaacgccgtcagccagttctacggttgcgcctttagcgtcaactgcagttactttaccggttacgatagcgcctttcttgttcagagcaacgtagttgttgaacggatcttccgccagctgtttaacgcccagggagatacgctcacgttctgcgtcaacctgcagtacaactgcagcgatttcgtcgccttttttgtattcacgaactgcttcttcgcctgcaacgttccaggagatgtcagacaggtgaaccaggccgtcgatgccgccgtccaggccgatgaagataccgaagtcagtgatagacttgattttaccttcaacacggtcgcccttgttgtgggtttccgcgaactgctgccatgggttagatttgcactgcttcagacccagggagatacgacgacgttcttcgtcgatatccagaaccataacttccactacatcgccaacgttaacaactttggacgggtggatgtttttgttggtccaatccatttcggaaacgtgaaccaggccttcaacgccttcttcgatttcaacgaagcagccgtagtcggtcaggttggtcacgcgaccggtcagtttggtaccttccggataacgcttagcgatagctacccacggatcttcgcccagctgtttcaggcccagggatacacgggtacgctcgcgatcgaacttcagcactttaacagtgatttcgtcgccaacgtttacgatttcgctcggatgcttaacgcgtttccaggccatatcggtgatgtgcagcaggccgtcaacgccgcccagatcaacgaatgcaccgtagtcagtgaggttcttaacgatacctttgacttccatgccttcctgcaggttttccagcagctgatcgcgctctgcgctgttttcggattcgataacggcacgacgagaaacaacgacgttgttacgtttctggtccagcttgatgactttgaattcaagctctttgccttccaggtgcagcgtgtcgcgcaccggacgaacgtctaccagggaacccggcaggaacgcacgaataccattcagctcaacagtgaagccacctttaactttgccgttgataacaccgactacagtttcagcgtcttcgtaagctttttccagcgtgatccaagcttcgtgacgtttagctttctcacgggacagcagggtttcaccgaagccgtcttctactgcatccagagcaacgtcaacttcgtcaccaacctggatttccagctcgccctgggcgtttttgaactgctcagccgggatggcagactcagatttcagaccagcgtcaaccagtacgatatctttgtcgatagcaacaacaacaccacgaacgatggaacccgggcgggtttcgatttcttttaaggattcttcaaatagttgagcaaaagattcagtcatgtttaatcttcaggtttcatatttaacgtccacctggctccgtgccggatggggttgtttaacatacccgctaacactccgttgctgcgggggtactgctataattcggaggcttgcgatgctttgccggtttacggttaagcgacagccagtttttcgcgcgcatattgtagcgctttttcaattacttgctcaatgcttagttcggtggaatcgagaactaaagcatcagcggccgggataagcggcgccacggcgcgattacggtcgcgatcgtcacgctcttttatctcggacaaaagacgttcaaagttaacactaaaacccttctcctgcaactgtagcaggcggcgctgcgcacgttcttccgccgatgcatcgaggaagattttaaccggcgcatcggggaacacgacggtgcccatatcgcggccatcggcaatcaggccaggcagttcgcggaaggcacgttgacggcgcagcagcgcttcacgcacgcgtgggaaagccgcaaccttcgaggcggtattggccacttcctgggtacggatctccgcactgacatcctcaccttccagcaccacttccaggttgccatcagtagaaataaaacgcacatcgagatgggctgccagcggaaccagcgcctcttctgactcgacgtcaacgtgatgatgtaaggcagccagcgccaggacgcgatagatggcgccggaatcaagcagatgccagccgagcgcttccgccattgccttgcacaatgtgcccttacccgcaccgccaggtccatcaatggtgattaccggaacatttgccgtcatctttttctcctttagcaaggcgcatgaatataaacgccgcgcattatacgcatcaatgcgccagaaagtgagcattgcgtgcaaattacggaatagaagaaattaaatgtagaagaattgcgcaattatagcgggctggcggaatgccagcccggaagatgacaaagctttactttctcagacgaggcagactttacgccaacgtactaattcgtgccaactgctcgaaataatccgggaacgttttcgccgtgcatttcggatcaaggatagtgaccggtgtcgccgacagtgccaccagcgagaagcacatcgccatccggtgatcgttgtaggtaccaatttccgcaaatttcagcgtcgcaggcggcgtaatgcgaatataatcttcgccctcttccacttccgcgccgactttacgcagctcagtcgccattgcaaacaggcggtcggtctctttcactcgccagttgtaaatattgcgcagcaccgtggtacctttcgcgaacaacgccgcggtagcgatagtcattgccgcatccggaatatggttcatatccatatcaacggcattcagctcaccgcgggtacaggcgatgaaatcgtctccccaggtaatggtcgcgcccattttttccagcacgtcggcaaagcgaatgtcgccctgtacacttttgcggccaatcccggtcactttcaccgtaccgcctttgatagcgccggcagcgaggaaataagaggcagaggaagcatcaccttccaccagatagtcgcccggggactgatattgttgattgccgcgcacaacaaagcgctggtagtgatggttttcaacgtcaacgccgaaggttttcatcaggtgcagcgtgatgtcgatataaggtttagacaccaggtcgcctttaatcgcaatcgtcgtgtcctgcggcgccagcggcgcagtcatcagtaaagcagtgaggaactggcttgagacgctgccatcgacttccacctggccgccgttgaaaccaccgcgcagacgcagtggcggatagttttcctgctccagatactcaatctgcgcgccgccctggcgtaaggcatcgaccagatggccaatgggccgctctttcatccgcggctccccggtcagcacgatatcgttgtggccgaggcacaacgccgccgccagcgggcgcatcgccgtaccggcattaccgaggaacaattccaacgcgctgctggcctgcagctggccgccgttaccgatgacttcacaacgagtgcgatcggcagacagggtgtagcgaactcccagggcgttaagcgcattaagcatgtggcgaacatcatcgctgtccagcaaattggtcagcacggtggtgccgtgggctaatgccgccagcaacaaagcgcggttagaaacactttttgacccgggcaggtttacggtgccatcaacgcgcgcaatgggttgtaacgtcagggattccatggaacttaactctcaaaaacagaataaaaaccccgcagaccggccgcggggatgaaaataagcactcgactattagccgcgacgacgttcgaagtcctgcatgaagtcggtgagcgccttgacgccggccagcggcatcgcattgtatatagaagcacgcataccgcccaccacacggtggcccttcagcgcatgcagaccagccgcaaaagattcttcaaggaacagtttgtccagcgcgctatccgccagttggaacggcacgttcatccgcgagcggttggccgcggcaacatcgttacgatagaaatcgctgttatcaatcacgccatacagcaattcagccttctgctggttgattttatccatcgcagcgacgccgccctgctctttcagccatttgaataccagccccgccagataccaggcgaaggtcggcggcgtgttgaacattgaatcattggcgttcagcacggtgtaatcaaggatcgatgggcaggcgacgctggctttacccagcagatcttcacgcacgacaaccagcgttaaccctgccgggccgatattcttctgcgcgccagcgtaaatcacgccatagcggctgacgtcaatttcatgcgacaaaatactggaggagtaatccgcggtaacgaccacatcatcgccaaagtttggcgtttcgtggatagcgataccatcaatggtttcatttggacagaagtgcagataagccgcgcccggcgtcaactgccattcgctcatcggtttaacggctcgcaggccgtcaacggtggttttcgcatcaataacgtttggcgtgcagtatttttgcgcttctttcaccgcacttgccgcccagtagcccgcatccacataatctgctgtcgttttgtcacccagcagatttaacgggatcccggcaaactggccgcgaccgccgccatgacagaacaacactttatagttggaagggatgttgagcagatcgcggaaatcctgttctgccgtttcagccacctggataaactccttaccacgatggctgatttccattaccgacgtccccagtccgtgccagtcgcacagttcctgttgcgccagtttgagaacttctgccggcagcattgccgggcccgaactaaagttatagacctgagccatttcccctcaccacgttgctatattgtctgcacgcgaaccgtcgcgggcataagttattcctgtggctatcggttttatcattcagtgacacacaccgcaacgagtaaaactcgccaccccgaaaacgagcccgccatcacacaaaagaattgaccaccttgacgtcattaaaccgacataatcgctgcgagcagatcgcttttgcctctctttccgccatccattccggatttggactgaggcataaataattatcatctacattcacaggaatcgatctcgccatcgtgcaatccgtcaactcatttaatacttgaatattatcttaattcttcatgaattatgtttctgcgcgagctctgccatttaccgccgcatttccagatcattaaaatttttataccagccgatggagactggtattaatcacttttaaaggaatatttatgcgtgaattaacctgtaacgaaatgtctgatgttagcggcggctttggcctgttatccattccggcagccattggtttgctggtcagcatcccgacgattgtcatcggcgcgattaccggcccctttacgctgggagctggcttcgcggtgatggcggcaggcatcgttggcaccagccttgccggcgcggccatgatcgttagtatttgtacaccagtactgtaactcgtgatggcatgtggagtttctccgcatgccatttaccgctcttctctttttatccgttagcgcggcgaacgacatagccacttacctacaaaacccgtatcattgcccatcctgccaacaataaacgaattgctatgacccagacatttatccccggcaaagatgccgccctggaagattccatcgctcgcttccagcagaaactgctcgacctcggatttgatattgaagaggcctcgtggctgaatccggttccacatgtgtggtccgttcacattcgcgataaagagtgtgcgctgtgctttaccaatggtaaaggcgcgactaaaaaggcggcgctggcatccgcgctgggcgaatattttgaacgtctgtccaccaactacttcttcgcggacttctggttaggcgaaaccatcgctaacggtccatttgttcattatccgaacgaaaagtggttcccgctgactgaagacgatgaagtaccggaaggtctgctggatgcccgcctgcgcgccttttacgatccggacgatcagttgactgccagtatgctcttagacctgcaatccggtaatgacgagcgcggcgtttgcggcctgccgtttacccgtcaatccgacggcgaaaccgtttatattccgatgaatatcgtcggcaacctgtatgtctccaacggcatgtcagcgggcaataccccaaatgaagcgcgcgtgcagggcttgtctgaagtctttgagcgtcacattaaaaaccgcatcatcgcagagagcatcagcctgccggagatcccggctgaagtgatggcgcgctatccgggcgtcgtagaatctatcgctaaactggaagccgaaggtttcccgatattcgcctacgatggctctcttggtggtaaatacccggttatttgcgtggttctatttaacccggctaacggtacctgcttcgcctctttcggcgcccatccggatttcggcgtggcgctggagcgtaccgttaccgaactgctacagggccgcagcctgaaagacctcgacgtctttaccccaccgacctttgatgacgaagaagtcgccgagcacgccaacctggaaactcacttcattgattccagcggcctgatctcctgggatatgtttaaacaggatgccgactatccgtttgttgactggaatttctccggcacgactgaagaagagttcgccaccctgatggctatcttcaaagccgaagataaagaggtctatatcgccgactacgagcatctgagcgtctatgcttgtcggatcatcgttccggggatgtctgatatttatccggcggaagacctgtggctcgccaataacagcatgggcgcccacctgcgcgacaccattctctccctgccgggcagcgagtgggaaaaagaagattatctggcgctcatcgagcagatggacgatgaaggccttgatgatttcactcgcgtccgcgagctgttaggcctggcgacgggtaaagacaatggctggtatactctgcgaatcggcgagctgaaagcgatgctggcactggccggaggcgatctggaacaggcgctgatttggacggagtggaccatggaattcaatgcctccatcttcagccctgagcgcgccaactattatcgctgcctgcagacgctgctactgcttagtcaggaagaagaacgccagccgctgcagtacctgaacgccttcattcgtatgtacggcgcagacgcggtggaagccgcgagcgccgctctgagcggcgaagcgccgttctatggccttcaggcggtcgataacgatctgcatgctttcccggcgcatcagtccttattgaaagcctacgaaaagctgcaacgcgcaaaagcggccttctgggcaaaataatcctttaggggtaaaaaataacgtacggagccgccagcggctccgttttcttatgatttgttccaaaaccacgtcattttgtaggtgcaaggttaaatataagtaaaaatcaaactttggtgatatttagattgttaattttaataaaaatactccattttaattaaccgtaatcaatggtcactcatggaaattttcaacattatttgtaaatattaaaatttagttttccattaaaaatcaatatgataaatcaattacagcctaattccacacgcaaaatgggcctatgactccggtaggatatgatctacatcaaattcccttctataatgctttgttagtatcacaccgccaacttatataaagagagagttagtgtgaaagctgacaacccttttgatcttttactccctgccgcgatggcgaaagtcgccgaagaagcaggtgtctataaagcgacgaaacatccgctgaagacgttttatctggcgattaccgcaggtgtcttcatctccatcgcttttgtgttttatatcacggcgaccaccggtactgccgcaatgcctttcgggattgccaaacttatcggcggggtatgcttctcactaggtctgattctttgcgtcatctgcggtgctgaccttttcacctcgaccgtactgatcgtcgtggcgaaagccagcgggcgtattacctggggtcagctggcaaaaaactggcttaacgtctatgttggaaacctgatcggcgcgctgctgtttgtactgttaatgtggttatcaggcgaatatatgactgccaatggcggctggggcttaaatgttctgcaaactgcagaccacaaaatgcaccacacgtttattgaagccgtctgcctgggtatcctggctaacctgatggtgtgtctggcagtctggatgagctactccggccgcagcctgatggacaaagcgatgatcatggtgttgccggttgcgatgtttgtcgccagcggctttgaacacagcatcgctaatatgtttatgatcccgatgggtatcgtaattcgcaactttgcgagcccggaattctggaccgctatcggttcaactccggagagtttttctcacttaaccattatgaactttatcactgataacctggttccagtcactatcggaaacatcatcggcggtggtttgttggttgggttgacgtactgggtcatttacctgcgtggcgacgatcatcattaatggttgtctcaggcagtaaataaaaaatccacttaagaaggtaggtgttacatgtccgagcttaatgaaaagttagccacagcctgggaaggttttgcgaaaggtgactggcagaacgaagtcaacgtacgtgactttatccagaaaaactacaccccatatgaaggtgacgaatccttcctggctggcgcaactgatgcgaccaccaagctgtgggacagcgtaatggaaggcgttaaacaggaaaaccgcactcacgcgcctgttgatttcgacacttccctcgcatccaccatcacttctcacgacgcgggctacatcgagaaagcgctcgagaaaatcgttggtctgcaaaccgaagctccgctgaaacgtgcgattatcccgttcggcggtatcaaaatggttgaaggttcctgcaaagcgtacaatcgcgaactggacccgatgctgaaaaaaatcttcaccgagtaccgtaaaactcacaaccagggcgttttcgacgtttataccccggacatcctgcgctgccgtaaatccggcgtgctgaccggtctgccggatgcttacggccgtggccgtatcatcggtgactatcgtcgcgttgcgctgtacggtatcgacttcctgatgaaagacaaattcgcccagttcaactcgctgcaggcgaaactggaaagcggcgaagatctggaagcaaccatccgtctgcgtgaagaaattgctgaacagcaccgcgcgctgggccagatcaaagagatggcggctaaatatggctacgacatttccggtccggcgactaccgctcaggaagctattcagtggacctacttcggttacctggccgccgttaaatctcagaacggcgcggcaatgtccttcggtcgtacttccagcttcctggatatctacatcgaacgtgacctgcaggcgggtaaaatcaccgagcaagacgcgcaggaaatggttgaccacctggtcatgaaactgcgtatggttcgcttcctgcgtaccccggaatatgatgaactgttctccggcgacccgatttgggcaacggaatctatcggcggtatgggcgttgacggccgtactctggtaaccaaaaacagcttccgcttcctgaacaccctgtacaccatggggccgtctccggagccgaacatcactatcctgtggtctgaaaaactgccgctgagctttaagaaattcgccgctaaagtatccatcgatacctcttctctgcagtacgagaacgatgacctgatgcgcccggacttcaacaacgacgattacgctatcgcatgctgcgtaagcccgatgattgttggtaaacaaatgcagttcttcggcgctcgcgctaacctcgcgaaaaccatgctgtatgctatcaacggcggcgttgatgaaaaactgaaaatgcaggttggtccgaaatctgaaccgatcaaaggcgacgtcctgaacttcgacgaagttatggagcgcatggatcacttcatggactggctggctaaacagtacgtcaccgcgctgaacatcattcattacatgcacgacaagtacagctacgaagcctctctgatggcgctgcacgaccgtgacgttatccgcaccatggcgtgtggtatcgcaggtctgtccgttgctgctgactccctgtctgctatcaaatatgcgaaagttaaaccgattcgtgacgaagacggtctggctgttgacttcgaaatcgaaggcgaatacccgcagtttggtaacaacgatgctcgcgtcgatgacatggccgttgacctggttgaacgtttcatgaagaaaattcagaaactgcacacctaccgcaacgctatcccgactcagtccgttctgaccatcacctctaacgtcgtgtatggtaagaaaaccggtaacaccccagacggtcgtcgcgctggcgcgccgttcggaccaggtgctaacccgatgcacggccgtgaccagaaaggtgctgttgcctctctgacttccgttgctaaactgccgtttgcttacgctaaagatggtatctcttacaccttctctatcgtgccgaacgcgctgggtaaagatgacgaagttcgtaagaccaacctggcgggcctgatggatggttacttccaccatgaagcgtccatcgaaggtggtcagcacctgaacgtgaacgtcatgaaccgcgaaatgctgctcgacgcgatggaaaacccggaaaaatatccgcagctgaccatccgtgtatctggctacgcggtacgttttaactccctgactaaagaacagcagcaggatgttattacccgtaccttcactcagaccatgtaattccctgtctgactgaaaaagcgtacaataaaggccccacatcagtggggcctttttaacaagtgattcccagccccagcctgctttgccagttatctatactttgggtacctgtcaaaacagacttaacacagccggtttgagctgtgcatcacaggccctggagggccgaacccggagatatcaccgcaatgtcaactattggtcgtattcactcctttgaatcctgtggcaccgtcgatggcccaggcatccgctttattaccttcttccagggctgcctgatgcgctgcctttactgccataaccgcgacacctgggatacccatggcggtaaagaaatcaccgttgaagaattgatgaaagaagtggtgacctatcgccactttatgaatgcctccggcggcggcgtcaccgcatccggcggcgaggcgatcctgcaggcggaatttgttcgcgactggttccgcgcctgtaaaaaagaaggcatccacacctgcctggataccaacggcttcgtacgtcgctacgatccggtgattgacgagctgctggaagtcaccgatctggtgatgcttgacctcaagcagatgaacgatgaaatccaccagaacctggtcggcgtttctaaccatcgtacgctggagttcgcgcagtatctgtcgaagaaagggattaacgtgtggatccgctacgtcgtggttcccggctggtctgatgatgacgactccgcgcatcgcctgggtgaatttacccgcgatatgggtaacgtcgagaaaatcgaactcctgccctaccatgagctgggtaaacacaaatgggtggcgatgggcgaagagtacaaacttgacggcgtacacccgccgaagaaagagaccatggagcgggtgaaaggtatccttgagcaatatggccataaggtgatgtactaaaccggcagcgggccggaggtactctcacgacggcccgcaactataatagtatcaatcccgccgataacgcctcatcatgagcgcaataccgtctgcccgcagaaatattcattaatcaaaacggactacgcgcggccttcgccgcgcgccagattggttacgcatgtgccaccggagtcggatgatgtccggctttgcgcagcagcgtcagcaggtagataaacgatacgctggcgatcataataaacagtaggttatcagagaagttctgcatcaacatcgccgtcagggtcggtcccagcaggctgccaatggtataactcatcagcagcgcctggttcatcgccaccagttgatggtgttcaaccttctcgcaggcccaggccatcgccaccggatacagggtaaaaccggatgcgccgagcacaaaaagcgccggtgccattgccgcctggctaagcatcgccagacagcccagaatcaccacaaagacctgcacgcgcagcaccagcaggcggccgtagcggtcagccagacgtcctattggccattgcccaaggatcccggcgctcaccatgacggccatccagaaaccaataccggaatcgctgacgccctgatggttcagccacagcggcatcaggccgtatagtgaaccaagaacgataccggagatgatgcagccattcacaccgtggcgcgcctgacgcagtttcagcatcggccagatacgtaccgtttcatgcggctcgtcggcctggctcataatacgtgtaaacattagcggcaagatcgctgccagcgccaggccggtaacccacggcagcacgctcattaaatcggtcggtaatttgctgaccatcagttgacccaatacggtaccgacataatagaccatcatgtacgccgccagcagccgaccgcggctgcgcgaagtgccgctgcacaccagcgcgctttctaccactacccagatcatcgcgcagcccacgccggcgataaaacgccagctcagccatgtccagaaaccgagtgtgatgcccaggccaacgcagccgacggcaaaaatcaatgacgccaggtaatagctacgattaaaccccagacgtttaatgacccaaccggcaaataaggttcccaccaggttaccggtgaaataagaggagccgaccatcccgacctgccaggttggcatattttcatgggcgagccagagcgggacaagcgtatttaaaaccgcgattgccagcgtcaacagaagcaagccacagagcaacatttgcactgggcgagtgtagatggtcatgggtattaaccgtgaggaagttcagatttcgtgcgcatcatgccactgctgtaaacattgtcaatccgccagaattcaggcctggcgcggttttcagggcaacgatagaagttttttatccagcggaacggcaacggaattattctttatattattccattgtttttattaatttattggaaaactaagaaggaaatatcagtagaaaaatttcatcaatcaaccgcattttttaatcacgccggaataggattccggcgtgattactcgcgtttaactggcgattgccataccgacggtcatatgcagaccatagaatacgccgcggccaatcatctcgccaaccagcaccagcgcaaacgccagacccaacagcggtaatgccggttgataacctttaagctgcggtacaatccagcagaccaacgccagcactaacgcgaccgtccgccatgccattaaggaaccgtaattcggcaccagcgccgaggcctgttggattgaactatggatcgtcgccaactcgctgccctgaatcaacgcgacggtcacgctaaccaccaatgccaccaacataatcaccggcaataaacgcatcgcccaaccgtccaccccgcgacacgcagcagcaggtagcccaacagcggcccgccgataaacagggtcaggaagaagttgagcggcgtccagatggtgtaccaggtgggtacggtatcgatggtgttatacacgcggatcatcatccagacaaagatgacgccgaggatcatggtgacgaccagccacagactacgcagcccagacgacagtttatttaccaccgccagcagccagccaatcccgccgacagcgaagaaaagcgcgccgctggctatttcattgcttaacgatgatgcgccaacgcggttcagcgaattaaacgcacgcattggtgaaccaaggtgcatagttgaggcgataaagccaatccccattagcacccacagcccaaacatgctcattatcacccgctgctgctgctcgcgtgaaagttcgcccttcatcaacgccagcgcgagaacgataaagccccggcgacgcattggccaaagaccgtgaaaatcatcagcggccattcatgccatccatttcccatttcagacctccttcgggttggccagatagccggtggtatcgccgcacggacggctgttggagtttggttttatcacaatgctcggcctggtgaagtgcgctgacggcaacggcgccacggcggccagctgaccgtgtttttcacgcagttcggcaataggcccgaagtccagcgcccgcagcgggcaggactcgacgcaaatcggtttcttgccttgtgccacacgctcgtgacagccatcgcatttggtcatatgccctttagcggcgttgtactgcggcgcgccatacgggcaggccatatggcagtagcgacagccgatgcacacctcttcattgaccaccacaaaaccgtcttcgcgcttgtgcatcgccccgctcggacagaccttggtgcacgccgggtcttcacagtggttacaggcaatggaaaggtagtaggcaaaaacgttctgattccagacgccgttgtcctcctgccagtcgccgccagcatactcgtagatacgacggaagctgacgtccggcgtcaggttcttgtagtctttacaggccagctcgcaggttttgcaaccggtgcaacgggcggaatcgataaaaaatccatactgagttgtcatcggttactccttacagcttttcaacctggacgaggttggtatgcgatgggttgcctttcgccaacggcgacggacgttgggtagtcagcacgttaatgctaccagcctgatccacgcgtgaggcatccgggttataccaggcgccctcgcccagcgcgacgacgcccggcatcatccgcggcgtcactttcgcttcgatatgcacttcaccgcggtcgttgaaaatgcgaatgcgatcgccattgacgataccgcgcttctgcgcatcgatcgggttgatccacatctcctgacggcaggctgcctgcaggacatcaacattgccataagttgagtggacgcgagacttgtaatggaagcctgtcagctgcaacggatatttagcagtcaacggatcgttgtagttttcaaaccctggggtgtagatcggcagtggatcgatcacatcgccttccggcagctcccacgtcgcggcgattttggcgagctcctgggaatagatttcgattttgcccgatggcgtggtcaacgggttggcctgcggatcgtcacggaaggctttatacgccacatgatgaccttgcgggtcacgctgcttgaagatgccctgctggcggaaagtatcgaaatccggaagttcgggaatcgctttacgcgactgctcatacaaataacgcatccagccttcctgagtgcggccttcggtaaacttctccgccaccccatacgtttcgccaactcggtggtcatctcatagatggttttgcattcgaaacgcggtttgatagcctggtcggcaaagatcacgtaggacatattgccgcaggaggcatccagcgcgaagtccatctgctcagaggcggtacagtccggtagcagaatatcggcgtatttcgctgacgacgtcatatgacagtcgattaccacaatcatttcgcacttcttatcgtcctgcaggatttcgtgggtgcggttgatctcggagtgttggttgatcaggcagttacccgcgtagttccagatcatcttgatcggcacgtcgagcttatctttgccgcgtacgccatcacgcagcgcggtcatttccggaccacgttcaatcgcgtcggtccacataaacatagagatgctggtctctaccgggttttccagcgtcggcatgcgctcgaacggcaggctatatgaaccttcacgcgcgccgctattgccgccattgatcccaacgttgccggtcagaatggcgagcatagagatggcgcgggtggcgatttcgccgttggcgtgacgctgaggtccccaaccctggctgatatacgccggtttcgccgtcgctatctcgcgggccagtttcacgatgcgctcacgcgggatcccggtaatggtggatgcccactccggcgttttagcgataccgtcggaaccctggccaaggatgtaagctttataatgtccattagccggcgcatcggcaggcagggttttctcgtcgtagccgacgcagtatttatcgaggaagggctgatcgaccagattttcagtaatcatcacccaagccagcgctgaaatgagcgccgcgtcggttcccggacgaatcgggatccattcatcttcacgcccggcgccggtgtcggtataacgaggatcgataatgatcattcgggcattggatttctgccgcgcctgctcaaggtagtaagtcaccccgccgccgctcatgcgcgtttcgccagggttattgccaaacaacaccaccaactgactgttttcgatatccgacgggctgttgccatcggcccaaccgccataggtgtaattcaaaccagccgcaatctgcgccgatgaatagtcgccataatgattgagatagccgccgcagcagttcatcagacgagcaatcagcgtttttcctggcggccaggaacgagtcagagttccgccgagcgtaccggttccgtagttcagatagatagattcgttgccataatctttaatcaggcgctgcatattgctggcgatagtgtcgaacgcctcttcccagctaatttgttcgaattttccctcaccgcgtttaccaacacgcttcatcggatatttcagccggtcagggttatagacgcggcggcgcatagagcggcctcgcagacaggcgcgaacctgatgcagaccgtcgtagttatcatcgccggtattatcggtttctacgtacttaatcgcaccatcaaccacgtgcatgcgcagcggacagcgactgccgcagtttacggtgcaggcactccaaaccactttctcactcactggcgccagcgtatcagcggcgtgcgcgatacgcgtgaagggcaaggtcaatgcgttgctggccatcgccaggccgcctatcgccgtggttttcattaaaccacgtcggctaacttcggcagccagtaaagcatcgggggctttgattttcatagatactcgctttggttgctcacaataagctaacaatcgttatataattttatatatatgggattttattggctttttatgctgtattaatccaaagggagtatcaccggattcactgaatggattattgcccggtatcaataaggatataaaaaaagcgcccacaggcgcttttaaggaaagagcagaaaagattaaccgatatattcgaggccacgcatatacgggcgcagaacttccgggatctcgatacggccatcggcctgctgatagttttccatcaccgcaaccagcgtacggccaaccgccagaccagaaccattcagagtatgaacgagacgagtctttttgtcggacttgctgcggcaacgcgcctgcatacgacgcgcctggaaatcccagacgttagagcaggaagaaatctcacgataggtatcctgtgccggaacccacacttcgaggtcataggttttacaggcgctgaagcccatatcgccggagcacagcgccaccttacggtacggcagacccaacagttgcagaaccttctcagcgtggccggtcatctcttccagcgccgccatggaatcttccggacgtacgatctgcaccatttcaactttgtcgaactggtgcatacggatcagaccgcgagtatcacgaccataggaacctgcttcagaacggaagcacggcgtatgggcggtcattttgatcggcagatcgtcttcgtcgatgatttcgtcgcgaaccaggttggtcagcggcacttcggcggtcggaatcaatgcgtagttgctgctatcggcttcttcttccagcggacgagtgtggaacaggtcgccggcgaatttcggcaactgacctgtaccgtatagcgtatcctggttcaccagataaggaacatagttctcgctatagccgtgctgttcagtgtgcaggtccagcataaactgcgccagcgcgcggtgcaggcgggccagttggcctttcatcaccacgaaacgggaaccggtcagcttaacggcggcggcgaaatccagccccccatgcatttcacccagcgtaacgtggtcgcgcacctcgaaatcgaactggcgcggcgtaccccagcggctgacttcaacgttgtcgttttcatcgcggccaaccggcacgtcatcatgaggaatgttcgggatcgccagcgcgatatcgcgaatttccgccagcagcgtttccagctcggactttgcggcatccagctgttcgccaagcttgttcacttccaggcgtaatggctcgatatcttccccgcgcgctttcgcctggccaatggatttcgatcgggagttacgctccgcctgcaggttttcggtttgaacctgcagaactttacgacgctcttcaagagcgcgcagtttatctacatccagcttaaagccccggcgtgccagtttttctgcgactgcgtctggctcggtacgcagcagattgggatcgagcatgcttatcctgtgcttatcgaatttaaataggaaaagtggccgcaaactacggccacggaaatataggtaataaccttaccgcaacgccacaattagcggtagcgttttatctggctattttgatccagttcggcaagccaggcgagcttttcagcgattttgccctcgagccccctgtttgttggctgataatagcgcgtttgcgccatttcctgcgggaaatactgctcgccagcggcgtaggcgttaggctcatcgtgcgcgtagcggtactcctggccatagcccatctctttcatgagtttggtcggcgcattgcgtaaatgtaccggcacgtcataatcaggacgatcgcgagcgtcggccagcgcggccttaaaggcggtgtagaccgcgttactcttcggcgcgcaggccagataaacaatcgcctgagcaatagcccgctcgccttctgccggcccaacgcgggtaaaacaatcccacgcggaaatggccacctgcatagcgcgaggatcggcgttgccgacatcctcagatgcgatagccagacaacggcgagcgacatacaacgggtcgccgcctgcggtaatgatccgtgcgtaccagtacagcgccgcatccggcgcgctaccgcgcacggacttatgtaacgcggatataagatcgtaaaaacggtcgcctttattatcaaaacgcgcgctacgctcgccggcaatttcggtaagcagttccgctctcagcactcgcttgcccgaatcgtcgttttcagccatatcggccatcatttccagcgtgttcaacgcccggcgcgcgtcaccgttaaccagttcggcaatcgccttgcgggtttcatccggcaggataatatcttgcccgccgtagcctcgcgctttatcgctcatcgcctggttgagtacctgctcgatatcgtccgtggtcaatgatttgagcaagtagacgcgagcgcgggagagcaaagcggaattaagttcgaatgacgggttttcggttgtcgcgccaataaaagtaatagtgccgtcttcgatgtgcggtagaaatgcgtcctgctgacttttattaaaacgatgcacttcatcgacaaacaggatagtgcgtcgaccagcgttacggttttgccgtgcgcgctcgatagcttcgcggatctctttaacgcctgaagtgacagccgagatacgttcgacatcggcattggcgtagcgtgcaatcacttccgccagagtagttttaccggtgcccggcggcccccacaggatcatcgagtgcaggtgccctgcctcaatcgcccgcggcagcggttttcccggcgccagcagatgctgctgaccaatgtactgcgctaaattttctggccgcatacgagcggccagaggttgaaatgcattatcggaaaaatcgagcgaaaaattgctcacattcgcctctacttacgttgatcgtccaccgtcaccccttgcggcggcgtaaaagtgaacttagatgcgtcgacggcgccattctgctgcgacttcagctgatagctgctgcgctggtcgtcctgctcaacggcgctgaactgatggatagtaccgtcacggcccacattgattgtgaactgcttaaggttgccattaccgcttttcggcgtcagcacaaaatcatcgccgttttgcttgatattgtattgctgccagtccgctgactgattgcgggcgatcagcatgaatggcgtgttgctggtcgcgtttttcaaccaggtcgcagttgcctgttccacaaacggattatagaaccacagcgttttaccatcagataccagaatactttcatccggctgggtcatatgccaattgaacagattcgggcgtttcacccacaaatcgccctgcccgtcctgtacggcattaccgcttgcgtcggtcactttctgagtgaagctggcatgaaaactgctgactttatccagacggctttttaagtcgccggcagcgtctgcccaaacctggcttaccacgaagccagacaataatgcacaggtgatggcaagtttcttcattgttgatccttattgtgcgtcactcccgacgcgggagcctgttctgtccttactgtagagccgttgagagcaacggaatagcagaacaggctgattttgcgcttatttaccgaactttgcacttactcgaagggcggcggcgccaggacttcacggttaccgttatgcccctgctcgctgacgatcccctgggcttccatctgctcaatgatgcgcgccgcgcggttatagccgatgcggaactgacgctgcacccccgagatcgaggctttgcgtttctcggtcacgaagttgaccgcctgatcgaacagcggatccagctcttcgccgccatcaaagccgccgctgccgccttcactttcgctgtcggaagtaatgccgtcaacatactgcggacgaccgcgcgctttccagtcctgcaccacggcgtgtacttcctggtcacggacaaacgcgccatgcacgcgaaccggcatcgtggagttcggcccggaatagagcatatcacccatgcccagcagcgattctgcgcccccctggtcaaggatggtacgcgagtcaatcttgctcgatacggtgaaggcgatacgcgtcggaatgttggccttgataagaccggtaatcacgtcaaccgacggacgttgggtcgccagcaccaggtgaatacccgccgcgcgcgctttctgcgccagacgcgcaatcagttcttccaccttcttaccgacggtcatcatcagatcggcgaattcatccaccagcaccacgatgtacggcagtttttccagcaccggatgcacggcatccatactgtcgcccggtttccagtatggatccgggatcgggcgtcccatgcgtgcggcctcagcgatcttctcgttgtagcccgccagattacgcacgcccagcgccgacatcagcttataacggcgctccatttcgttgacgctccagcgcagcgcattggcagcgtctttcatgtcggtgaccacttccgtcagcagatgcgggataccttcgtacaccgacagctcaagcattttcgggtcgatcatgatgaaacgaacgtcttccggctgcgccttatagagcatgctgaggatcatggcgttcacgccgaccgatttaccagaaccggtggtaccggcaaccagcagatgcggcattttcgccagatcggccaccaccggatcgccggcgatatctttgcccagcaccacggtcagcggcgatgggttctcgcggaatttcggacagtcgagcacttcgcgcaggtaaacggtctggcgttttttgttcggtaattccaggccgacgtaaggtttacccggaataacttccaccacacgcaccgccacggtcgacagcgaacgcgcaaggtcgcgcgacaggttagagatacgcgcggccttcacccccggcgcaaggttcagctcgaaacgagtgatcaccgggcccggcgagtagttcaccacatccgctttaatgcggaaatcggcgagacgtgcttcgaccagacgcgccatttgctctaacgcaaaggtatcgacaggttcaacttcgctcggcggcggcgtcaagagatccagcgacggcagcggcgttgttggtctttgcagcggacggctgtcgccattacgcatcagtagcggatgaataaggctatcctgcggctgcggcgcgggcggctgataaccctgctgagcaaccggctgttgctgctgcattggctgttgctgctgcattggtggttgagcagtttgataagcctgcggctgcggcgctaccggctgatggtgtacgggcggctgcgcaggttgataaccctgctgcggcgtggctggcggttgttggtagtgctgagccggttgctgaggctgcacttccggcgtcggcataaacagcggctcgctcgggccatcattaaccagcgttttcatcggcgagaactcatagtccgccggtgagaagggattggctcccggcggctgctcgctggcatagcgctgctgctgggtcgcggcaaactggcgcgccagttccgcttcagcggcagcgtcttcgtcctgctcatcgctttcggattcccaggactcgccatagcgctgttgctgggtggcggcaaactgacgcgccagctcgtcctgttccaacgcatcggcttcttcgtcgctcagcggctcattatcgtaatgatgttcaagctcggcccgacgcgcgcgctcttcagcaatacgctgagaaggcagcttaatgccataggaagcaagctcccgacgcgtcggcacacggacgcgattcggacgcggcaatttcggaccaatgccttcttttacctgtacccgcgggccgctggatgccgggctgaaaactggcgctgcctcggcggcggttgacgccgctgaggcggctgcggctgcgctgccagaagtggtggcctgatgaacgccagcggcgacggcggtcacggcggcggcatcaactgacggtatggatggagcagccggagtggttatcggtttggtcgccaccgggctcgccggttcagggattggctgataccaggactccagcaactcacgctcgcgcgcacgcttctcttcgacttcctcgaagtagtacatcggcggacgtttagtttcttcctgaggcgcttcaggctcagcggcaggtgctggttcctgatgataaacaggctgttgaacagccggttcaggctggtacaccggctgctgcggatgcgcggcttccggctggtaaaccggcggctgctgtggcgcatactcaggctgatacaccggctgctgcggatgcgcagcttccggctggtaaaccggcggctgctgcggcgcatactcaggctgatacaccggcggctgctgtggcgcatattcaggctgatacaccggctgctgcggatgcgcagcttccggttgataaaccggcggctgcggcggcgcatactcaggctgatacaccggttgttgcggatgtgcggcttccggctgataaaccggcggctgctgcggcgcatactcaggctgatacaccggttgttgcggatgtgcggcttccggctgataaaccggcggctgctgcggcgcatattcaggctgatacaccggttgttgcaggtgagcggcctccggttggtatgcctgccctgtcccctgctccgcccatgcctgcggcgcaacggcagcggcggaggcggcgccgatcgggtcggccaccgtatggccattcagtagcggatcgtaagggtctaaatcgccaggacgcgcggcgctggcgcctgagaaaaggacatcatcggcggcgacaggcgcgccgctggcgctgtattgtactgcttccgcatcatccatacgtttaccggagaacagcgcggcatcggttttacgccccatcgggttggcgaacttttccgccagacgcttacgacgcgctagcgcgctgcgtaagatgcgggcgcgacgcgattcccgcggctgtgcggtatcgtcgtcttcttcatcttcatattcatcatcttcatattcgccttcatcaacccaggtatcgtcccgacgggtacgattactggcaaaggtcaaaatagaaaggatggcgccgccaagtttctcggcaatgctgacccatgaccagccggtaaacagcgttaaacccgcggcccagatacaaagcaaggcgatagtgccgccgctgctgtgcagcaagggttgtaaggtggtgctaagcaggctgccaatgacgccgccggaggcaaagtaccagatatcgtcggcgttaattgccgccaggccgcaggaagtgaggatcagcgccagcgcgccgatcaggcgcagcgaaacagcgaagtaatcgacatactcgtcattttcctgatgacgccatgcaaaccagcagccgccgatgatgatcacggggatggtgtaggccattacgccaaagatgaaaaataacgtgtccgccagccacgcgccaggcatgccgcccagattatggataggctcatgccaggcggtctgtgaccaactgggatcggacggattaaagctcagtaatgccgccatcagccagatggcaaaaagagagcaaaggatgagtaacgcctcaagaacgcggcgcccgctgcttagcttcgtaagtttgacttctttgtcttcggtgtattcctggctcaagaaaggctctccaggtatcaggcaatttcctgcctgctgctaaaacggacaacagcgccgggtctccccggcactgttgctgtatggattaacaggagtgtaatcaaactacgtcgattttgcacctgttccgtgttagcgcgtcttgattaccagacgattactctgcttgacttcttccataaccacgtaggtacgggtgtcgtttacgcccggcaggcgcagcagggtttcgcccagcaatttacgatacgctgacatgtccggtacgcgggttttcaacagatagtcaaaatcaccggataccagatgacactcttgaatttcttcaagtttttgcactgcggcgttaaattgctcaaacacatccggcgcaccacgattcagagtaatctcaacaaataccagaagtgatgcatccagataatgcgggttgagcagcgccgtatagccctgaataaaaccctgtctttccagtcgacgcacgcgctcaaggcatggcgtcggagaaagtcccacccgtttggaaagctcgacgttggaaatacgcccgtctttttgcagttcattcagaatgttacgatcgatgcggtcgagatctttgccagggcgtttcttgctatctaccattattattgtctctctgtattccttccctactcctgttctgactctgcgccttcactgccagagcccatcccgttattacccgtacgacgttgagtaacccaggggtacgtgagaagtccgttgcctgatggcagtcaccgacatcacgcatggcgtctgtccacaccatgcgtagatttcgctgacccggataaaaatggcatttgcgtgcatgaacattcgccgcacgcgaaacactgcttttcttcttccatgaatgttttcgcaaaagcacaggggattgtcaaagcaaaacatcgatttttagtacaagatgccagatattcatcatcaacccccaccgaatctcatgttttcatcttataatcagggcgctaacagtagaattaattatattttccgctcgttaaatcgccaatccatcggcgggttctattgcacatatcgttaacaaaatcgctacgctctttttttacgcccgcaaattccctacaatccagcccaatgtatgccaataaaatatggggatctcatgggcacagccaaacacagtaaactgcttattctaggttctggacctgcaggatataccgcggcggtctatgctgcgcgcgcaaacctgcagccggtgctgatcaccggcatggaaaaaggcggtcagctgaccaccaccactgaagtggaaaactggccaggcgacccaaacgatctgaccggtccgctgctcatggaacgcatgcacgagcatgccaccaagttcgaaactgaaattattttcgatcatatcagcagcgtcgatctgcaaaaccgtccgttccgcctgatcggtgacagcggcgagtacacctgcgacgcgctgatcatcgctaccggcgcttccgcccgttacctcggcctgccttctgaagaggctttcaaaggccgcggcgtctctgcctgcgccacctgcgatggtttcttctatcgtaaccagaaagtcgcggtcatcggcggcggcaacacggcggttgaagaagcgctgtatctgtccaacatcgctgctgaagtgcatctgatccaccgtcgcgactccttccgcgcggaaaaaattctgatcaagcgcctgatggataaagtggaaagcggcaatatcgtgctgcacaccgatcgcaccctggaagaagtcaccggcgaccagatgggcgttagcgggctgcgtctgcgcgataccaaaaatagcgataacgttgagacactggacgtcgccggtctgtttgtcgccattggacacagcccgaacaccgctatctttgaaggtcagttagcgctggaaaacggttatatcaaagtgcagtccggcatccacggcaacgccacgcaaaccagtattcctggcgtgttcgccgcgggcgacgtgatggaccatatctaccgtcaggcgattacttcagccggcaccggctgtatggcggcgctggacgcggaacgctaccttgatggtttagctgacgcttgcaaataatctttacaagtcagtaacaaaggtaaagaaggcgacgaaaagtcgcctttatttttgcctcgttgtaacattgccgtgcccaaaaatctcataacgacacctgctaagcgcgcaatgaataaaacccgtcaacaagagttaacccgctggttaaaagaaaaaagcattatctcccgtcgctggttgatgatttctcgcctgctgggcgtcgtgagcggtctattgatcgtcgctcaggcgtggttcctggcgcgaatacttcaccgaatgattatggaaaatatcccggcgacggcgctgctgctgccgtttaccttgctggcgctggtgctgatcctgcgcgcctgggtggtgtggctacgcgaacgcgtcggctttcacgccggccaacatatccgttatgaaattcgccgccaggtgctggaccgccttcagcaggcgggcccggcctggattcagggaaaacccgcaggcagttgggcgacgctcattctcgagcaaatcgacgatatgcatgattactacgcgcgctatctgccgcaaatgacgctggccgcctgcgtaccgctgctgattgttatcactatcttccccagcaactgggcggccgcgctaattttactcggtaccgccccgctgatcccgctctttatggcgctggttggaatgggcgccgccgatgctaaccggcgcaatttccttgcgctcggtcgcctcagcggccacttcctcgaccgtctgcgcggcatggagacgctgcgtctgttcaaccgcggcgaggctgaaattaccaatatccgtgacgcgtcgcaggatttccgccagcgcacaatggaagtcctgcgcctggcttttctctcctccggcgtgctggagttctttacctcgctctctatcgcgcttgtggcggtctatttcggtttttcctacctgggcgagctcgacttcggacactacggcgtcggcgtcacgctgatgtccggttttttaaccctgatactggcgccggagtttttccagccgctgcgtgatttaggcacattttaccatgccaaggctcaggccattggcgcagcggatagcctgaaaacctttatggaaacgccgctggcgcaggctgaacggggcgagaaaacgctaagcgatcatgaactgattcgcctcgaagcccgcgatctgatcgtgaaatcaccggatggcaaaacgctggcaggcccgcttagttttaccctgaacgccggagaacgtgtggtactggttggccagagcggctccggtaaaagctcgttgctgaatacactgacaggctttcttccctatgaaggttcgctacaggttaacggcgtggagttgcgcgatctcgatgctgaacgctggcgtcggctaattagctgggtcggtcagaacccgcaactgcccgcagccactctgcgtgaaaacgtgctgctagcgtggccagaagccacggaagcgcaactgcagctagccctggataaggcctgggtcagcgagtttatctcccaattgccacaaggtattaataccccggtaggcgatcaggctggcggcctctcggtcggccaggctcagcgtattgccgtagcgcgtgcgctgctggtgccgtgccgcctgttgctgcttgatgaaccagcggccagccttgacgcccatagcgaacagcgtgtgatgcaggcgctgtcaaacgcctcgacccagcagaccacgctgatggttacccaccaactggcaggacttgccgagtgggatgctatttgggtaatgcagaatggacagattgtcgagcaaggcgactatgcgcaactttctgccgctggaggcgcgtttgcctcgctgttagcccatcgccaggaggaaatttaaatgcgcgcactgttaccctatctggcgctatacaaacgccacaaatggctgctgaccctcggcgtggtactggctatcgtcactctgctggcaagtatcggactgttaacgctttccggctggttcctctccgcctcggcggtcgtcggcgtcgccggcatctatagttttaactacatgctgccagccgccggcgttcgcggcgcggcgattattcgcaccgctggccgctactttgagcgtctggtaagccacgatgccactttccgggtattgcagcacctgcgcgtcgccacttttagcaaactgcagccgctctcccctgccggcctggcgcgttttcgtcagggtgagttgctcaaccgcatcgtggcagatgtcgatacgctggatcacctctatttgcgcgtgatctcgccgctggttggcgcgctggtggtcatcctggtggtgaccatcggcttaagcgtactcgatgtcaccctggcgctaacgcttggcggtattatgctggcgacgctactcctgcttccaccgctgttttaccgtgctggtaagccgaccggggagcatatcacccagctccgcgggcagtatcgccagcaactcacctcctggctacagggacaggccgagttgatgctatttaatgccagcgatcgttatcgtaaacagatggaaaaaacggaacagcgctggcaagaggcgcagcgccgacaggctgagcttaccgccctgtcgcaggcgctgatgctgctgattggcggcatcgcggtgatcgtcatgctgtggatgtcctccgaaggtgttggcggtaatggccaaccgggcgcactgattgccctcttcgttttctgcgccttagcggcatttgaagcgctggcgccggtcaccggtgccttccagcatctcggccaggtcattgcgtccgcgcgtcgcattacccagattaccgagcagcagcccgaggtgaccttcagccaacaggcgccgcaaagcttctcccaggtagcccttaacctggatggggtgaccttccgctatccgcagcagtcggcgcctgcgctaaaagatatttcactgcaggtcgcggcaggcgagcatatcgctattcttggccgtaccggctgcggtaaatccactctgctccagctattgactcgtgcatgggatccggccaacggtcagattcagctgaatgatcagccgcttagcgatttgtctgaaacgaccctgcgccaggcgatgagcgtcgtgccacagcgggtgcatctctttagcgcgacgctgcgcgataatctgctgctcgccgcaccgcaggccagcgacggcaaacttatcgatatcctggagcgcgtcggtctggagaaactgctggaagatagcggcctgaatagctggctcggcgaaggcggacgtcagctttccggcggcgagctacgtcgactggctatcgcccgcgcgctattgcacgatgcgccgctgatgctgcttgatgaacccactgaaggtctggatgcaacaacggaaagccagatccttgatttacttaatgaagtgatgcgcgataaaaccgtgttgatggtcactcaccgtctgcgtgggctggcgcgttttaatcagataatagtcatggacaacggccaaattattgagcaaggtagtcacgcagagctgctggcgaaacagggccgttattaccagtttaagcaacgtctgtaagctattattgtcaacaattgctggtgcgtattgaggtcaaaaatgcgtctggttcagctctctcgtgactctatcgccttcccttccccggaaggcgccctgcgtgaaccaaatggcctgctggccctgggcggcgatctcagcccagcccgtttgttgatggcctatcagcgcggtatctttccgtggttttctcccggcgaccctattttatggtggtcgcccgatccacgcgccgtattgtggccggaacaatttcactttagccgcagcatgaagcgttttcatcaacgttcgccttatcgggtgacgctcaaccacgccttcggccaggttatcgagggctgcgccagccatcgtgatgaaggtacctggatcacctccagcatcgttcaggcctatcaccagttacatgagctcggtcatgctcattcaatcgaggtatgggatgaagatacgctggtcggcggcatgtatggcgtggcgcagggagcgctgttttgcggcgagtcgatgttcagccgggcggaaaatgcctccaaaactgcgctgatgatcttctgtcaggcttttgcccaggacggcggcagattaattgactgccaggttctcaatgcgcataccgcctctttaggggcgattgaaatcccgcgtcgcgattatctcgattatctttccgtattacgcacctaccgcctaccggagcgattttgggtaccaagggtgctatttaccggtaatggataaatgttttcagcacatttcttagcgtggtggtataattgcgcggtagagtagcttctgcctgttgccccgccgccgtttgggaataataagagtcagataacgcccatcgttctgtcactgccctttacgtttgcgcctgtcatgtggttttaccgcgtgtattccgggcaatgcgccaaaactacttcggcgatttatacccgtcatgtttttagctgcaggcgctggctgcgcgcaattatttaccgccagcttgcgacgcgaattgttttgggtatacgtaaaactttacatacttgctgaacttcggcattatcttgccggttcaaaactacggtagtgataccccagaggactagatggccaaagaagacaatattgaaatgcagggcaccgtacttgaaacgttgcctaacactatgttccgcgtagaactggaaaacggtcacgtggtaactgcgcatatttccggtaaaatgcgtaaaaactacatccgcattctgacgggcgacaaagtgactgttgagctgaccccgtacgacctgagcaaaggccgcattgtcttccgtagtcgctaattgtttccgccgctaaggcgtcagatgctgaagaccgggctcttgcccggttttttcatttccgcttcccgcacgcaggctgagttttccggcgctttcaccaacgccagggtgtcgttttgccctttttcgcgatctgcgcgccgagtttaacgataaactcgcgtcatatccggacatttgacctgagcgataaaaaaagaccgggctgtcaccagcccggtctttatcactgaactattcagtattgattaatgcgccgcttccggtttgtgcttctgcgcgctgtggaatccgtaggtcagtacgttgttggctttatccaactcaacggtaacctgcccgccgtccaccagcgaaccaaacagtagctcattcgccaacggtttcttcaggttgtcctgaatcacccgcgccattggacgcgcgcccattgcccggtcatagcccttctctgccagccagtcacgcgcttcctgactcacttccagcgaaacgcctttctgatccaactgtacctgcagctcgacgataaacttatcgactacctgatggatcacagtggtagagaggtgatcgaaccagataatgttgtcgagacggttacggaactccggcgtaaagatctttttgatctcttccatcgcatcggtgctgttatcctgctggataagaccaatcgatttacgctcggtttcccgcaccccggcgttggtggtcatcaccagcaccacgttgcggaagtccgctttacggccgttgttatcggtaagcgtaccgttatccattacctgcaacaggatattaaagacatccggatgcgctttttcgatctcatcaagcagcagcaccgcgtgcggatgtttgatcaccgcatcggtcaacagcccgccctgatcgaaaccgacgtaacccggaggcgcgccaatcaagcggctgacggtatgacgttccatatactcggacatatcaaaccgcagcagttcaatgcccagcgctttcgccaactgcacggtgacttcggttttaccgaccccggtcggcccggcaaacaggaaagatccaaccggtttatgctcatgtccaagcccggcacgcgccattttgatggcttcagtcagcgcttcaatcgccttatcctgaccaaagaccaacattttcaggcggtcgccaaggtttttcagcgtatcgcgatcgctgcgggagacgctcttctccgggatacgcgcgatgcgcgcaaccacggattcgatatccgccacattgaccgttttcttacgcttgctgaccggcatcagccgcgcccgcgcgcctgcttcgtcgatcacgtcaatcgccttatccggaagatgacgatcgttgatgtatttcaccgccagctcgaccgccgcacgtaccgctttggcggtataacgcacatcgtggtgcgcttcgtatttaggtttcaaaccgttgatgatctgcaccgtctcttcaacagaaggctcagtcacgtcgattttctggaaccgacgcgccagcgcgcgatctttttcaaagatgttgctgaactcctggtaggtcgtggagccaatcacgcggatcttgccgccggacagcagcggtttaatcaggttagccgcatcaacctggccgccggaggccgcccctgcgccgatgatggtatggatctcatcgataaacaggatgctattggtatcctgctcaagctgtttcagcagcgctttaaagcgtttttcaaaatcgccgcgatatttagtccctgccagcaacgaaccgatatccagcgagtaaatagtgcaatccgccatcacttccggtacgtcgccctggacgatacgccaggcgagcccttccgcaatcgcggtcttaccgacgccggactcacccaccaacagcgggttgtttttacggcggcgacacaatacctgaatagcacgctccagctctttatcacggccgatcagcggatcgataccgcccacgcgcgcaagctggttgagattggtggtgaagttttccatacgatcctccccgcctgcttgctcttcgttacccggctggctcgcgttattttccgaaggctggctgggctcgtctttgcgcgtgccgtgagagatgaaattcaccacatcaaggcggctgacttcatgtttacgcagcagataggcggcctgcgactcctgctcgctgaaaatcgcgaccagtacgttggcgccagtcacttcgctgcgaccggaggattggacgtggaaaaccgcacgctgcagcacgcgctggaaacttagcgtcggctgggtgtctcgctcttcttccgtagccggaaggacgggagtggtctgttcgatgaaggcttcaagttcctgacgcaaagcgaccaggtccacggaacaggcttccagcgcttcgcgtgccgaggggttgctgagcaaagccagcaacaagtgctcgacggtcataaattcatgacggtgctcgcgcgctctggcgaaagccatgtttaaactgagttccagttcttgattgagcataggcacctcccccaattttcatgcctgtaatcaggctttctctagcgtacacagcaatggatgctcgttctccttggcgtactggttcaccatagcgactttggtttccgcgacttcggcggtaaaaacgccgcaaatcgccttaccttcatagtgaaccgtgagcatcagttgcgttgcacgttctacatcataagaaaagaatttttgtaacacgtcaataacaaactccattggagtgtagtcatcattgactaatatcactttatacatagatggtggtttaagcgcatcacgaacttcatcttctaccagttgatcgaagtccagccaatctctcttactcatcgtcaatgttcgtcatcggttgctgttgccaacaggccgaggcctgtcgatgatctgaggttatgcacattacaaatctacaatagatcatagataactatcatctatggcttccatccgcgacgcctgtcacattccccagcaatagcgttaactgcttcaaattttgacgcatttttcaccgtccaccctcgtcaattgcttgacgcatttccgtatttctctaaattgtactggcgagagttggcgagcaattgtacaactcgtgactccctaccggttcattccatcttacttataaagatttacgaaggatgtcgaagtatggaaatgggtactgttaagtggttcaacaatgccaaagggttcggtttcatctgccctgagggcggcggcgaagacattttcgcccattactccaccatccagatggatggttacagaacgctaaaagccgggcaatccgttcggtttgatgttcaccaggggccgaaaggcaatcacgccagcgtgattgttcctgtggaagcagaaacggctgcataactcttttgcttcattgtgtacatcctgctaataaaatgccagtccttctgactggcatttttatctccctactcccgtgccagcgcatccacggggtctaatcgcgcggcattacgcgccggcaaccagccaaacagcaccccggttaacgttgaacacaaaaatgcggtcaacagcgccagcggcgaaaaaccgatttcccaaccgggtaagaacagttgcagaatgaacgcgatcatcaacgacaaactcacgccgatggcgccgcccaccaggcaaaccagcaccgcttcaataagaaactgttgcagaacatccctggcccgggcgccaaccgccatgcggatgccgatttcacgagtacgttcagtgactgacaccagcatgatattcatcaccccaatcccgccgacgaccagcgcgatcaccgccaccagggtcaggaacagctgtaacgtatgtgtggtcctttccgccgttttcaagacactgtccatattccaggtgaaaacatcttttttgccatggcggagctcgagcaaccgcaccagctgctgctcagcggtggcgctatcgtagccctcctgcacgcggacggttatcgagttaagccacgattgccccatcacccgtccggccatcgtggaataaggcagccagacgcgaagaattttgctgctgccgaacatcgattgtttctcatcggctacgccgacaatcgtcgccggcatattaccgaccaaaatcacctcgccaaccacttttgctttgtgaggaaatagctggcggcgggcgttgctatccagcaccaccacttgcgcccggctattcagctgcagctcattgaaagtattcccctcgctgaacgtcatgccgtaaacattaaaatattgcgcgccaacgccttcagcgctggcggccacatcgatgttattggcgcgcagacgcaagcttttagataccgccggcgtcgcggagctcacccaaggctgtttttgaatcgccagcagatcatcatattttaacgcctgttgataacgcggatcgtcgtcgccaaaatctttgccggggtaaacatcaatggtattggtgccgatagcgcgaatatcggctaaaaccagttgtttcgccgcatcgccaaccaccacgatagagacgaccgaagcgataccaataatgatgccgagcatcgttagcagcgtgcgcattttattcgccgccatcgcccgccaggccatcaccagcgcctcgcgaaaaccgctactgaactgacgccagacggaaggctccgcacgggcttcagcgcgaagtatgccgcctttctccaacgatgacggcggcgggttgcgcacgatttcaccgtcgcgcagttcgatgattctttccgcctgcgccgcgacctgcgggtcgtgggtgacgataatcaccgtatgcccttgcgccttaagctgatgcaggatagccatgacctcttcgcctgagtggctatccagcgccccggtcggttcatcggcgaggatcacctcaccgccgttcatcagggcgcgggcgatactcacgcgctgctgctggccgccggagagttgcgacgggaagtattccgctcgctcacccagacctaatcgggtgagtaaatctcgcgcccgttcaaggcgaacccggcgctctttgccggcatagatggcagggacctcgacgttttgcgccgccgtcaggtgcgataacagatggtaacgctggaaaataaagccgaagtgctcgcggcgcagcctggccagttcatcgccgctcagatgcgccacatcgaccccggcaacctgataggtgccgctggtaggcttatcaaggcaaccaaggatgttcatcagcgtcgattttccggatcctgacgccccgacaatcgccaccatttccccggcggaaatactgagggtgatccccttcagcacgtcaacttcaccgtcgccagaggggtaactacggcgaatttcgcgcagttcaagcagcgccgtcatttagtcgctccgggcgtgctttcgctgataatgacctcatctccctcttccagccctttcgccactaccacatcggtatcgttacgcgcgccaataacgatttcacgttctttcacttccccgttgcgcagcaggcgcacgttgtagcggttatcgccgatggcgtcgcccagcgcgctgagggaatagtaatcacgtttttcacttccgccagttggatatgcacctgcgcggtcatttcaagacgcaggatcccctgcggattggggacttcaaaacgcgcataataaaatatggcatcattgaccttttccggcgtcggcagaatatctttcagcgtaccttcgtaacgggtcagagggtcgccaagtaccgtaaaccaggccttttgccccggcttaagatggattacgtccgcctccgaaacctgagcttttaccagcatggtactgagatctgccagggtcaggatgtttggcgcctgttgggcggcaatcaccgtctgtccctgcagggtggtgatttgcgtcacttcgccggacatcggcgccaggatacgcgtatagtcgaggttggttttcgcggtgtcgagggtcgcctggttacgtttgatctgcgcttcgatggtgccgatttgcgcctctttcaccgccacatcggtggcagcggtatccagatcctgacgtgagaccaattggcgctgcgccaactgctgctggcgcgctaatgttacttgcgcgagcttacgttcggcctgcgcctgtttcaactgcgcgcgcagttccatgagcgtcgcgtcgacttctttaatctggttttccgcctgctccgggtcgataacccccagcaactggtccttttgtactttatcgccaatattgacgcgcagcgttttcaactggccgctgacctgcgcgccgacgtcgactttacgcagcgcatctaatttacccgtcgccagtacgctctgctgcaggtcgcctttacgcgccaccagcgtttgatactgcggcaacggcgcattcagaatacgccatccccagatggccgcaatcactaccaccagcgccaacagccaccagactttcctgcgttttccattcaatgtcataaaaaattcctgatctattccccgcagctcggacgatgattctaacggaagcagcggcgaacagaagccagaattttagcaatgcttaatgtttattgatgttcggctgcggcgagtcttgcgtaacatggcacggttttcgccgctggcctaatcagcgcgcccgcgcgccagccacagcacgcgggaaaacatctttttcagtaacgtcggcacggcgtcgattccccgccgcccggcctccattgcgacctctatcgccagatcgggtttcgatgaacgatgtatggcttttgtgatcacccggcgcatgttcatcggcatattatccgggatctgcgccacgcgatggtaaacatcgtcgaacccctgacgatacataaagtgttccatatccatcgccggaagcatggttaagtgcacccgttccagttcgttatcattgttgagcaacccgcgtaccgtagcggcatacttcttaccggcctcatcgccatctaccaacacatgccattcaatccccatccggcgggcgaattttatcagcggcttgagcccggattgggcgaattcaatcaccttcaccccttcagcatcgaaatgatgcccgcactggcgcgccagttcgttgataacccaggtttccgtttcgccttccaccagtaaccagcaacgggcaaacagcgatgacgcgcggttgaagcgaatgtgaaacgcaatgcggcgactatcttccgcattcatcccgccgggaccgagccgccacgccgagacgcgggacgattcacgcaccagccgacacacctgctcaaccggcgtcaacgacaacagctcgccggaattggtcgtggtcactcgctgcagtggcagcagattcagcaaatgccaggcgaccgagagcatgatcggatgcagacgcgtttccgggtcctcaatcagcagcagcggccgcgcatcgcgatcgagtcggacggttcccttcgcctgcaataaagtggagaacaacccaagcaagatcacccgatgactgcgaccgccgggtttatcaatcattcggttaataatatcgagatagcgccagctgcgttgttcgtcatgagaacgtcggcgcatcaggcgattgcggctttgcgcgctactctgctcggcgaagtaatgttctagcagttgcaccatcgccgacagcccttcgcggatttgtccatcggtaagattttgcggatgattgaccagttcgcgggagagaaaatccagttgcctggcggtaatctcaatttgcggcgaatgcggcacggttccgttgtgaattcggcgcataaagcgggcgtcgcgcaggcgcaataccggcattaagcgcaccaggtggcgcgccagatcgtcgatatcatgcatctccagcgcctctccctggcagttaataaaactacgcagagtcatcacgctgccgtcatccgccagctcaccctcaaggcgatagaaaatgcgctgatagccgtcatcacagggcacccagcaatcgctaaggggacgaaaacggcgtacgcgatggcgcccgggttcattttcgcggaaggttaaaatgatatgcaggtgatgctcccgcccctgaatatcgccgggggaaaccagaagtcatcgcgcacgaaatggtacaggtcaaactcaggcgataaaagcagcgtcagagcgtccagcagactggatttcccccaggcgttctcgccgattagcacattgttttgctcaagcatcaacgataaacggttgataccgcgaaatccgacgatctctacacgctcaagatgcatatcccctccacctggcgccacattctccttcagtaatcagcagtatagcgagaccggggcgacatggcatcctttgcgcaaagagtgaaccatagcccgttggaacataagagtttgtaaggttacaacacttaatttcatttaattaattaaataattcatcattgtgagtagtttatttttcaaatttatgttctacacttgcataattcatgcatggtgaaaggaagaccatctcattgctctaaatcaaattacatcaatttatttaactagtccgagggtggcgttcgttcctaaaatagcggcgctttatttttatcgtcattctttgcgtcgataaataaagaccggcacgtcataacgtgttcgtttacattattatttgaggtggttatgttcagaaaattagcagcagagtgctttggcacattctggctcgtattcggcggctgcggtagcgcagtgctggcagcggctttcccggaactgggaattggttttgccggcgtggccttagcctttggtttaaccgtattaactatggcgttcgccgtgggccatatttccggcggtcactttaacccggcggtgactttaggtctgtgggctggcggtcgtttcccggctaaagacgtaattggttatattgtcgcacaggttgtcggcggtattattgccgccgccgtgctgtacgttatcgccagcggtaaagccggtttcgacgctgccgcgagcggcttcgcttcaaacggtttcggcgaacactccccaggcggctactccatgctgtccgctatcgttatcgaaatcgtgctgacctgtggtttcctgctggttattcacggtgcgaccgataaaaacgcccccgcgggctttgcgccgatcgctatcggcctggcgctgacccttatccacctgattagcattccggtcaccaacacgtccgttaacccggcgcgtagcaccgcggtcgctatcttccagggcggctgggcgctgcaacagctgtggttgttctgggttatgccaatcatcggcggtatcctcggcggcgtgctgtatcgcaccctgctcgaaaaacgcgactaatcctcgcgagaagcccggcgatgccgggctttttctttttgtcgacagctttactcggcctggcgaattgggtagtgtcattggcgctattcttaatttgcaaggaccttgccgttcatgttttcgggactattaatcattctgctgccgttgattgtcggctatctgattcctctgcgtcacccttccgcacttaaactgattacccggctgctgagctggattgtttacgtgatcctctttttcatggggattagccttgccttcctcgataatctcagcagcaatctgttgtcgatactgcattactctgcggtaagcattgtggttattattctgtgcaatattgcagcactattatggctggataaaaaaatgccgtggcgggtcaagcatcgtccggagaaattaccctcgcgcctggcgatggctctcgagtcgctgcagctgcttggcgtggtgctaattggattcctgctgggattaagcggcctctcttttttacagcatgcgaccgaagccagcgaatatacgttaattttcttgttattccttattggtattcagttacgtaataatggaatgacattacggcaaatagtgcttaaccgtcgtggcatgattgtcgcggtcgtggtcgcagccagttcattatttggcggagtgattaatgcccttattcttggcctgcccattaaaaccggtctggcgatggcatccggcttcggctggtactctctttccgggatcctgctgaccgaatcctacggcccggtcattggcagcgcgacattctttaacgatttggcccgcgaactgctggctattatgctgatccccggcatggtattgcgtagccgctccaccgcgcttggcctgtgcggcgcaacctcaatggactttactctaccggtgctacagcgctccggcggcgtagaaatcgtccctgcggccatcgtacacggttttattctcagcctgctggtgccagtgctgatggcgttcttctcagcctgatccccccgtggcggtagattccctaccgccaaaattgcgctaaatcaatctccctttaagttgtgtcagaaataccttttctccgtacagccacaggcataaccttaaacatgtatctaaaatataactttaaaaggtgtgatcatgttttgtgtgcaatgtgaacaaactatccgtacgccggcaggaaatggctgttcttacgcgcagggtatgtgcggtaaaaccgcagaaacctccgatttgcaggatctgctgattgcttctctgcagggtctctccgcctgggccgttaaggcgcgcgaatacggcatcatcgatcatgaggtggataatttcgccccgcgcgcgttcttctctactctgaccaacgtgaacttcgactcgccgcgtatcgtcggctacgcccgtcaggccatcgcgatgcgcgaggcgctgaaagcgcaatgcctgaatattgatgccaaggcttcggtcgacagcccggtagccgatctgcaactggttagcgatgatctgggcgatctgcaacgtcaggcggcggactatacgccaaataaagacaaggccgcgatcggtgagaatatcctcggcctgcgactgctgtgcctgtacggcctgaaaggcgccgcggcctacatggaacacgcgcacgtgctcggtcagtacgacaacgacatttacgcccagtaccataaaatcatggcgtggctgggtacctggcctgccgatatgaacgctctgctggagtgttcgatggaaatcggccagatgaacttcaaagtgatgagtatcctcgacgccggtgaaaccacgaaatatggccacccaacgccaacccaggtcaacgttaaagccaccgaaggtaagtgtatcctgatctccggccacgatctgaaagatctgtataccctgttggagcagaccgaaggtaccggcgttaacgtctatacccacggtgaaatgttaccggcccacggttacccggagctgcgtaagtttaaacatctgataggcaactacggcagcggctggcaaaaccagcaggttgaattcgcccgcttcccggggcccattgtgatgacctcgaactgcatcatcgacccaaccgtcggcgcttacgacgatcgcatctggacccgcagcatcgtcggctggccgggcgtcaatcatcttgaaggcgaagatttctccccggttatcgcccaggcgcagcaaatggctggcttcccgtatagcgaaatcccgcatctgatcaccgtcggtttcggccgccagacgctgctcggcgcggcggatacgctgattgatttggtcagccgtgaaaaactgcgccacatcttcctcgtcggcggctgcgacggcgcgcgcggcgaacgtaactacttcaccgatttcgctaccagcgtaccggacgactgcctgattttgaccctcgcgtgcggtaaataccgcttcaacaaactggatttcggcgatatcgaaggcctgccgcgtctggtcgacgccggtcagtgtaacgatgcctactcggcgattattctcgcagtaacgctggcggaaaaactgggctgcggtgtaaacgatctgccgctgtcgttggtgctctcctggttcgaacaaaaagccatcgtcatcctgctgacgctgctgtcgctcggggtgaaaaacatcgtcaccggcccgaccgcgccaggcttcttcacgccggacctgttagccatcctcaacgagaagtttggtctgcgttccgtgactaccgtagaacaagatatgcagcagttgctgagcgcataaggagtcaccgcatgacaatgccaactcatcagtgcccgtggcggatgcagattcatcatattcagcaggaaacgccggacgtgtggaccatttcgttgctgtgccacgactactatccctatcgcgccgggcagtacgcgcttgttagcgtgcgccattcggcggatacgctgcgcgcctacacgctctcctcaacgccgggggtcagtgaatacattacgctgaccgttcgtcgtattaatgatggcgcaggttcacagtggttaacccgcgatgtgaaacgcggcgactatatctggctgtcggatgcgatgggcgagtttacctgtgaagataaaacaaccgatcgttttctgatgctggccgccggctgcggcgtgacgccgattatgtcgatgcgccgctggttagcgaagtaccgcccgcaggcggatgtgcaggttatctttaacgtgcgctcgccaagagatgtgatttttgccgaagagtggcgtcagtatccggtcacgctggtggcggaaaatgacgcgacgccaggctttatcgctgggcgtctcactcgcgagctgttgcaaagcgtgccggatttagccagccgtaccgtgatgacctgcggcccggcgccttatatggagatggtcgaacaggaagtgacggcgcttggcgtgacgcgtttctttaaagagaagttctttaccccggtggcggaagccgctaccgacggattgaaattcaccaagctgcagccggcgaaaacgttctacgcgccggtcggcaccacgttgctggaagcgctggagagcaataaggtaccggtgaccgtcgcctgccgcgctggcgtctgcggctgctgcaaaaccaaagtggttgccggcgaatatagcgttaccagcaccatgacgttgaccgatgccgaaatcgccgacggctacgtgctggcctgctcctgccatccgcagagcgatctggttctcgcctgaggtcaaaatccccggtggcgctaccgcttaccggggctacagggccgtaggccggataaggcattaatgccttatccggcacttttttaccgccaggccgactgaccggccaacgaataacgcccaccccctaacagcgcaattgccagcgcgccgataaagaaatagaccaggctttcaatcgcccatgcgccgacagcatccagcgcgaacgttttacctgtcccaaccatcagccaggccaccgccatggtaaacgccagcaccagcgccgccggacgcgtcaaaacgccaagaatcagtaaacaaggcgcgacgacttcccccgccagcacgccataggcaataaagcccggcagccctttcgcgaccagcatgccgctgatgccatccacgccgtcgattagcttatgcagaccgtgaaacaacattaagccgcccacggcaagtcgtaacaagagtttaccggcatcttcatgcgacagcgttttatttactacgtttaacaatcccttaaccatttgatgtggttcctgttttacatcctgtgtgctcccagagtatgcacaatattccgccaacaaaaccagcgaaaaataaggggaaatcggcaacgcaacctatagtttcatctaagcttgatagcgttatcacaaaaaggagatggaaaaccatgaaacagaccgtggcgtcatacattgcaaaaacgcttgaacaggccggcgtgaaacgtatttggggagtgaccggggattccctcaacggcttgagcgatagcttaaaccgcatgggtaccattgaatggatgccgacccggcatgaagaggtcgccgcctttgccgccggcgcggaagcacagctcaccggcgaactggcggtgtgcgccggttcctgcggacctggcaaccttcatctgattaacggtctgtttgattgccatcgtaaccacgtaccggtgctggccatcgccgcccatattccgtcgagcgaaatcggcagcggttatttccaggaaacgcatccgcaggagctgttccgcgaatgtagccactactgcgagctggtctccactccggagcaaattccgcaggtgctggctatcgccatgcgtaaagcggtgattaaccgcggcgtgtcggtggtggtcctgcccggcgacgtggcgctgaaaccggccccggaaagcgccagcagccactggtatcacgctccgcagcccacggtcactccggcggatgaagagctgcacaagctggcgcagctgatccgctactcgagtaatattgccctgatgtgcggcagcggctgcgccggcgcgcaccaggagctggtggagtttgcggcaaaaattaaggcccctatcgtccatgctctgcgcgggaaagagcacgtcgaatacgacaatccttatgatgttggcatgaccgggcttatcggtttctcttccggtttccataccatgatgaacgccgacacgctgatcctgctcggcacccagttcccctatcgcgcgttctaccccaccgacgccaaaattattcagatcgacatcaaccccggtagcatcggtgcgcatagtaaggtcgacatggcgctggtgggcgatataaaatcgacactgaaagccctgcttccgctgctggaagagaaaaccgatcgccgcttcctcgataaagcgctggaggattatcgcgaagcgcgtaaagggcttgacgatctcgccaaacccagcgaaaaagcgctccatccccagtatctggcgcagcaaattagccactttgccgacgacgacgcgatctttacctgcgacgtcggtacccccaccgtctgggcggcgcgctatctgaaaatgaacggcaaacgccgcctgctgggttcgtttaaccacggctcgatggccaacgccatgccgcaggctattggcgccaaagcgaccgcgccgaatcgccaggttatcgcgatgtgcggcgatggcggtttcagcatgctgatgggggattttttatcgctggcacagatgaagctaccggtgaaaatcgtcatttttaataacagcattctcggctttgtggcgatggagatgaaagccggcggctatctgaccgacggtaccgagttgcacgacaccaatttcgcccgcattgccgaagcctgcgggatcaaaggaatacgcgtcgagaaagcttctgaggttgatgaggcgctgcagaccgcctttagcaccgacggtccggtattagtcgatgttgtggtagccaaggaagaactggcgatcccgccgcaaattaagctggagcaggccaaaggatttagcctgtatatgctgcgggcgattatcagcggacgcggcgatgaagtgatcgaactggcgaaaaccaactggctcaggtaaaacaatgctatcaccctgaatcagaacaaggatatgccgtgatagatcttcgcagtgataccgtaactcgccccgggcgcgccatgatggaggccatgatggccgctccggtcggggacgatgtgtatggcgacgacccaaccgtcaatgaactccagcgctatgccgctgagcttgcaggcaaagaggcggcgctgtttctgcctaccggcacccaggccaacctcgttggcctgcttagccactgccagcgcggcgaagagtacatcgtcggccagggcgcgcacaactatctgtatgaagccggcggcgcagcggtgctgggcagtattcagccgcagccgatcgatgccgcggcggacggttcgctgccgctggataaagtcgcggccaaaattaagcccgacgatatccatttcgccccacccgcctgttaagcctggagaatacgcacaacggtaaggtcttgccgcgcggctatctgcaagaggcctgggcattcacccgccagcgcaatctggcgctacacgtcgatggcgcgcggatctttaacgccgttgtagcgtacggctgcgagctgcgcgatatcgcgcagtactgtgattcgttcaccatttgcctgtcaaaaggactcggtacgccggtcggttctctgctgctgggcagcgaagcgtacatccgccgcgccattcgctggcgtaaaatggtcggcggcgggatgcgtcaggctggtattctggccgccgccggtctgtatgctctgcagaataacgtttcccgtctgcaggaggatcacgacaacgccgcatggatggcggaacagctacgcgccgtcggcgctgacgtgatgcgccacgacaccaacatgctgttcgtacgcgtcggtgaggagcaggctcgggcgctcggcgaattcatgcaggctcgcggcgtgttgatcaacgcctcgccagtcgtgcgtctggtcatgcatctcgatgttaatcgccagcagttgacggaagtggtcggtcactggcaagcctttttacaacgctaaggagtcaggcgtgtcgcaatctattctggtgcttggcgccagcggctatattggccagcatctggtgcgcgaattaagcgcgcgagggtatacggtgttggcggcggcacgccatatcgacaggctgcagaaactagctcttcccggcgtcacctgtcacgctatcgaccttaatcagccgcaggatctcccagctctgcttcgcggggtcgataccctttactacctggtgcatggcatgggcgaaggcggcgatttcatcgcccatgaacgtcgggtcgccgttaacgtacgcgatgccttgcgtcagacaccggtgcgccaggtgatatttctcagctcgctgcaggctccggcgcaggagcagtccgaccatctgcgcgcccgccaggtgacggccgatgttctacgcgagtcagggagccccgttaccgagttacgggcgggtatcatcgtcggcgccggatccgccgcttttgaagtgatgcgcgacatggtttacaacctgccggtgctgacgccgccgcgctgggtacgatcgcgcaccacgcccatcgcgctggaaaacctgctctactatctgatggaattacttaaccatccgacccgtgaacaccgcgtcttcgaggctgctggcccggatgtcctgagctatcagcagcagttcacccattttatggcggtcagcggcaagcatcgcctgttaatccctatcccctttccgactcgctggatttcggtgtggttcctgaacgttattacctcggtgccccccaccatcgctaaagcgctgattcagggctaaagcacgatctgatcgccgacgatcgttcgctacgcgcgctgatcccacaaaccttaattcccttcgatcaggcggtgcgtcgtaccctgaaagaggaagaacagctggtgaactccagcgactggggctacgacgctcaggctttcgcccgctggcggccggagtatggttactacccaaagcaggcaggctgcacagttagcacccaggcgagccgtaaggcgctgtggcgagtggtgaaccaaatcggcggcaaagagggctacttctttggcaatatcctgtggaaaatccgcggcgctatggacctgctggtcggccaccgcctggccaaggggcgaccgcagcatgattatctgcagaccggcgatacggtggatagctggaaggtgattattgtagaagaagaacaacagttaaccctattgtttggcatgaaagcccccggtcttggtcgtttaagctttaccattaacgataaaggcgaccatcgcgaactggacgttcgcgcctggtggcatccgcacggcatgcccggcctgttctactggctactgatgatcccggcgcatctgtttatttttcgcggcatggcgcgacgcatcgcccgccaggccgagcaaatcacaggcaaaaacgaagattaagcgttattctttcatgattctcattgcatactcgggagaatcacggaaaaatgcgcacgaaattcttttctgggacagtagattgatatgaaggtactggttaccggtgcgaccagcggattaggccgtaatgcggtggaatatctgcgcaacaagggcatcagcgtgcgagcgaccgggcgcaacgaagcgatgggtaagcttctgagcaaaatgggcgcggagtttattcccgctgatctaaccgaactggtctcttcgcaggctaaagtgatgctcgccggtattgatacgttatggcactgttccagctttacctcgccgtggggtacccagcaagccttcgatttagctaacgttcgcgcgacgcgtcgtcttggcgaatggtccgttgcctggggcgtacgcaacttcgtccatatctcatcgccttcgctctatttcgactatcaccaccatcgcgatattcaggaagatttccgcccgcaccgcttcgccaatgaattcgcccgcagcaaggcggccagtgaagaggttatcaacctgctggcgcaggcgaacccgcatacccgctttacgatattgcgcccgcaaagcctgtttgggccgcatgataaggtctttattccgcgaatggtgcagatgatgcgccactacggcagcgtgctcttgccgcgtggcggtaacgcgctggtggacatgacctactacgaaaatgcggtgcatgcgatgtggcttgccagtcagccgcagtgcgaccacttaccttccgcacgggcttggaatatcagcaacggcgagccgcggacgctgcgcagtatcgtgcagaagctcatcgacgagctgggtatcaagtgccgaatccgctcggtgccctatccgatgttggatattattgcccgcagcatggagcatttcggcaataaatcggcaaaagaaccggctttcacccattacggcgtttctaagctcaatttcgactttaccctcgatatcagccgcgcccagcaggaacttggctatcagccgatcgttaccctggatgaaggggttacccgcaccgccgcgtggttaaaagaccacggcaaactgcacgactaaaaccgacacttacggcagcaagtcacccggtttgctgccaaatgctcatccctgtccatatttttccagcaacgcctcggcgatggcctgcgtttgcgcatcggccacaccgtcccagcgtgccggcctgaagtgcatctgaaaagccatgatcacccgtttttgctgcgcaggggtcatatctggggtgacctgatagccatagcgcgacagcaggtctaacaattcgccgcgatcgaccggctgccagctcggacgtccttgcagataaaaggcgacccgcgcatcatcgggccaggcgccaattccctgctgcgccagcgcccgccatgggaacagcgggccagggtcgtccttgcgctgcggcgcgatatcggcatgggcgacaacgttttgcggctgaatgtgatagcgggcgatgatatctttcgccagcgggataagcgcttcaatttgcgctggattaaatggggtaaaacgttttatatcgccatttttttgccagccgcggttttccagctcgataccgatcgacgtatcgttgatgcgcgtgctgccgcgccagaagctgataccggcatgccaggctaaatcttcctccggcaccagttgccagatacgcggtttaccgtggtgccgcggcggctgctcggggattaaatagtgcgaactgacctctttatcggtcagggtggccaaagagacatcaaagttatcggcggtatagtgaatgaccaggactttaatacgcggataggccgcctgcgccggatgacgggtatccaactgataaccctgtttgtcgacaatgccctgctcctgcgcacagcctgccagcagcaaagcggcaagcgcaagctggataatgcgctttcctaataagaccatcgattacgcccttcttgcttggctttatacagcgctgcatccgcctgcgcgatcaactctgaaggtgggatgcctccctctgaagcaacaattcccatgctgaccgtcaccagcggcccaacttcggatttggcatgcggcagcgccgcttcgcgaattttctgttggatccgctgcgccaccgccgtggcgctatctaatgattgcagcggcaggacaatcacaaactcctcgccgccatagcgcgccaccatatcatcctgggtgcgcaccgacatcttcagcactgaggcgatgcaggagaggcagtaatccccagcctggtggccataataatcgttatagcgtttaaagaaatcgacatcgagaatgatcagcgccagcggctctttacgttcccaggcctgcgctaaaaaattatccagcgcccggcggttcgccgtcgccgtcaacgcatcctgattcgccatgttttccaaccgattaatcagttgcatgttttcctgatgggttttccaggcttcatcataccagcgctgtaatatctgccggccataaatcataatggcggtgcatattccccacagaatcagaaaacgtaaatcgacaccatgatgtatttgcacgccagcgagtaatgaagtacccataaaggaacaaggtaagccacaaggcccacaggaaaataatagagcgcggcaagaccggtggtcattaaaataaccagcagcggccaggcgaacggcagcgaccataaaatgatgaagcagtaactactcatcgaccaacataagctgagaatcaacaagatagcggaaatcacttttgtggcataaataccacttaatattcgcccggagataaccatcacgcaaagcgccagcgagaaaacgataatggccccaagcgccatctccagataaggaataatatcatggtgagtcaatctctgatgatcaaactcggtaaacagaacgttgcggaagatgaccatcaaggcaaaggcgatattgacgaacgccaaccacggcatgctacgcgacagcgcgtgtttttgcacattttcgcgattggcccacagcgctgcccgatcctggcgcggatccagacgttgttcggtcggcatagctactccttttttagcgactggacaagcagttgagctgcccgctgtgactttctctttataataaaccatcaaccccggaatgtctgttgctggccgctgcagccactcgccgcttaacgtcattttcatctatcgacagatgaaaatggtcttactccatgacactgtctatttcgcgaaaaaaagcaagtattatcaatgagaaccttgtcatcttttctttaaaaaatcgttaattttaggtcataaaaatgcagcatttcgcttgaaaaaaagacgggcttgattcaatctgatggcgctcattggttagttaaaacaagagcatgatgatagcaagataaacaatggagattaataatatgaaatatgcagctttagtggcaggtgcagcattgtttttaaccgcaaacgcgttttctgcagaaattctgagtaaagaagatttcgctaaggtagagggtcaataccaaaaaattggcactatctcgtctaccggacaaactgcgccaagcgatgcgcgcgaagaactgatcaaaaaagccgatgaaaaaggcgctgacgttgtggtgctctcttccggtaacaccgataagaaactgcacgtatccgcgaatatctataagaagaaataattagttattgccgatatagaaacattatcatcgaatggtgatagtgtttcttacttattactctgcgaatgtttttttttatactttttttccatttacctctcgttaatagtcatatcaaatatgcgccttcatcaggatgctaatccgtataacgtctaaaattggtaatccactccgttatcggactcgcaatatatcccccggactatcagtataaatccgacgctaaaaaagatatgtcctctatactttgggcataagaatatgctcgcgttttacattaccgcaggtggcaaatgaaaaaaatcgcattccttatttctgggttgctctgctctggcttcagccatgccagcgcactctatttttatgaaatcggcaccgaagacgtcggcctggcaggcgcaggccaggccgcccgcgcgcaggacgcctccaccatcgtcaccaaccctgctggcatgacccggctgccggatcatatgtttaccggcggcgcgcaggtcatgggcggcgatatcccgtaccagatgaataatgaccacggcggtaatagtcctggtaacgtgatgaatctgttcccgaacgccagcggcttttatgcgcagaaaatcaatgatgatgtgtatgccgggatcggtctgtacggcaactacggtttaggcattaattttggaaactgggccggcgaccggctgatcaaaaaaagcaccatggtggcgatgacgctgagcccatcactggcgtggaaacttaacgataggctctctgtcggcgcatcggccaacctgaactacggttatttatcgctgacgcgtaacgtcgacggtaatgatgagaaagataaagatcatgattgggcgatgagctaccgtctgggcctgctgatgcagttgaccgaccagacccgagctggcatcacctggaacagtaaaaccgattatgactttaacgttaaggggaaagcgcgtttccccaatttaccgaacgttgcgtatgatttgcctatctccgcccaggtccgcgcgccgcagcagatcatgctcagcatggtccacgatattaataaacagtggtcggtcatgggcgatctcggctggcaggactggagccagttcggcagcccgcaaatcaccgttgccggtcacgaaagtaataaaaataaccgcctgaaggactcctggcataccgccgtcggcgtgcagtaccgaccgaccgagcagtggcgtctgaacgccggcgtaggtttcgacagtacggtttatgattcgcaaagcgacacggcgctctccctgccaaccggcgatgaatggcgcttcgccaccggcgcgcaataccagataacccccgccagcaatatcggcgtcgcggtatcctatctacatatgcaatcttcccacgtaaaatcaccggaaattattgccggcagctacgatcatccttacctgtggttcgccagcgtcaactatagttatcagttctgatgcgccggctgcccgcgcaagaggcgcgggcagccgatggtcgttgtcacatcaaggtcttagctctttgcgtcaagtacaattggcgcgcttacgctatgctttagcagaatctaacaacgtagtgagttcataaggaaatcatcatgcgctacaacattcttgcacttgttttgccttgcgcactggcgctgagcgcctgtaccaccgtgaccccggcttataaagacaacggcacccgcagcggttcctgcatcgagggcggcccggacgaggtagcgcagcagttctatgattatcaaatccagcaccgtaataacgatctcaccgcgctgcgcccgtatctgagcgacgatttggctaaactgctgaacgacgcccgtcaggacccatcgcgtaacgcgctgctgcaatcaaatccattctccagcagttccaccccggcggatagcgccgacgtcgccagcgcctcaaccatcccgaaccgcgatgcgcgcaatattccgctgcgcgtcgaattgaaacagggtactcagagctggaaagatgaagtactgatgattcaggaaggccaatgctgggcggttgacgatgtccgctacctcggcataaacagccacgctccggccgggtcgctgcgtcagagtcttgagaaacgctaatttcggcgttaaagccaccccgctgaaacgataaccccggtaaaatgtcggtattccgtgcggtaacgccgacatttgttcccccctaccacacgaacccatattttgtgctaactttagtgataaatgtggtttacatttaacttttaacgcataaatattgcataactattctgtcaaaggtactatttgcggcctcaatagctatttgtatcagactgcccagatgagtattaaactaaacggcattaattgcttctacggcgcgcaccaggcgctgttcgacatcacgctggattgcccgcagggggaaacgctggtgctcctcggcccaagcggcgccggtaaaagctcgctgcttcgcgtactcaacctgctggagatgccgcgttccggtaccttaaacatcgccggtaatcaattcgacttcaccaaagcgccgtctgacaaagctattcgcgagctgcgccagaatgtcgggatggtcttccagcagtacaacctgtggccacacctgaccgtggtgcaaaacctgatcgaagccccgtgccgcgtgctgggcttaaccaaagatcaggcgctggcacgcgccgaaaaactacttgagcgtttacgccttaaaccctacagcgaccgctatccgctgcatctgtcaggcggtcaacagcaacgcgtagcgattgcccgcgcgctgatgatggagcctcaggtgctgctgtttgatgaacccaccgccgcgttggatccggaaatcaccgcccagatcgtcagcatcattcgcgaactggcggaaaccggaatcacccaggttatcgttacccacgaagtggaagtggcgcgtaaaaccgccagccgcgtggtgtatatggaaaacgggcatatcgttgagcaaggggatgctaactgcttcgcgcatccgcaaaccgacgcctttaaaaactatctttcacattgatgtttacggggaaataacgatgaaaaaagtactgattgccgctctgctcgcgggcatgagcctttccgctaccgcagcccagaccatccgtttcgccaccgaggcctcctaccctccgtttgagctggtagacgccaacaacaaaatcgtcggctttgacgtcgatctggctaacgcgctgtgtaaagagatggacgcgacctgcacctttactaaccaggctttcgatagtctgatcccagggctgaaattccgccgcttcgacgccgtcatggccggtatggatatcacccctgagcgtgaaaaacaggtgctgttcagcaccccgtattatgaaaactcggcgctgtttgtcggccagcagggtaagttcaccggcattgaccagttgaaaggcaaaaaagttggcgtgcagaacggtactacccatcagaaatttattactgataagcatccggaaatcaccaccgttccttatgacagctaccagaatgccaaactggatctgcaaaacggccgcattgacgccgtcttcggcgacacggcggtagtgaccgaatggctgaagagcaatccgaagctggcaccggtgggtgataaagtgacggataaagactacttcggtaccggcctcggcattgcggttcgtcagggcaataccgagctgcagcagaaatttaacgctgcgctggaaaaagtgaagaaagatgggacgtaccagaccatctatagcaaatggttccagaagtaacgctgaatgaacgaattttttccattagcaagcgccgccgggatgaccgtcggccttgccgtttgcgcgctggtcatcggcctggtgctggcgatgcttttcgccgtgctggagtctgtgaaatggcgccctgtggcatggctggcgaccggcatcgtcacgattttacgcggtctaccggaaatactggtagtgctgtttatctactttggttcctcacagctgctgctgacgctgtctgacggttttactcttaatcttgggtttgtgcagattccggtacagatgcaaattgagaatttcgacgtcagcccgttcctctgcggcgccattgcgctttccctgctgtatgccgcctatgcctcgcagaccctgcgcggcgccttgaaagcggtgccgcaggggcagtgggagtccggacaagcgctgggtttgtcgaaggcggcgatattcttccgcctggttatgccacagatgtggcgccatgccctgccgggtctgggcaaccagtggctggtgctgctgaaagataccgcgctggtcagccttatcagcgtcaacgatctgatgctgcaaaccaaaagtattgctacccgtactcaggagccgtttaactggtacatcattgcggcagctatttatctcgtcatcaccctgttgagtcaatacatcctcaagcgtattgatcagcgtgcgacgcgcttcgaacggagaccaggttgatgctcgattacttacccgaactgctgaaagggctccataccagcctgacgctgaccgcggcatcgatcgtcgtggcgctgatcctggcgctgatctttaccatcgtgctgacgttaaaaacgccggtggtggtgtggatcgtccgtggctatatcaccctgtttaccgggacaccgctgctggtacagatcttcctgatctactatgggccaggacagttcccgtcattacagaattacccggtgctgtggcatctgatttctgagccctggctgtgcgcgctgatcgccttgtcgttaaacagcgcggcttataccacccaactgttctatggcgccatccgcgccattccggacggccagtggcagtcctgcagcgcgctggggatgagcaagaaggatacgctggcgattctgctaccgtatgcttttaaacgcgccctctcctcgtactctaatgaagtggtattggtctttaaaagcacttcgctggcttacaccatcacgctgatggaagtgatgggccatggccaactgctgtacgggcgcacctatgacgtgatggtcttcggcgcagccggtatcatttatctggtggtgaacggcctgctgacgctgctgatgcgtctggtggaaagaaaagcgctggccttcgagcgtcgtaactaacattgtggactgcataaaaagtaaataatgaaacgggtaagtgctaatacttacccgttttttttataactaataaaataaacatacaactttattgcatataaattcatttagtggcattgtgaacttcagccgtaaaccggcacaacatcataagattgaccgacgggagtcccactatgaaaaagttagttctggccgcactgcttagctctttcgcctttggcgccgctgccgcggaaaaaatcagctttggcgtttccgcgacctatccgccatttgaatccatggatgcgaataaccagattgtcggtttcgatctcgatctggccaaagcgctgtgtaagcaaatgcaggccgactgtacttttaccaaccacgctttcgacagcctgatcccggcgctaaaatttaaaaagtatgatgcggtgatctccggcatggacatcacgcctgagcgtagcaaacaggtcgcgtttaccgacccgtactatgccaactcggcgctggtaatcgccaaaaaagacgcgtaccactcttttgatgacctgaaaggtaagcgtatcggcatggaaaacggcactacgcaccagaaatacctgcaggataagcacccggaagtcaaaaccgtcgcttacgatagctaccagaatgccattatcgacctgaaaaacggccgtatcgatggcgtcttcggtgataccgcggtggtcaacgaatggctgaagaccaacccgcagttaggcgcggcgacgccgaaagtgaccgatccgcagtacttcggtaccggcctcggcattgcggtgcgcccggataataaagcgctgctggaaaaactcaacgccgcgctgaaagcgattaaagctgacggaacctaccagaaaattagcaaccagtggttcccggagtaagatctacgcttcccggcttacggcgcaaccgcctgagccgggtctatcggcaacgctccccctcatagcggcagggtaaactggaaacaggcccctgccggtacttccagcaggcgaatatcgcccccgtgcagttgcagcatccggcgaacaatcatcaaccccagcccgccccgtgaggcgctctgctgccccggttccagtaccgatggccgctcaaacagattggcccgtaattcaccggcgacgccagggccgctatcggccacctcaaccaccacctgcgtccctgcaggcgcgacgagagacgaatttcgcccccatgcggagtgtggcgaatggcgttatccagcagattggttaatacccgctccatcatcgagaggtctgcctcaaccaaaggcaagcctgacgccaattccaggcgcaaacggatttcacgggtggcaatcgccagatcgaatttttgcgccacgtccagaatcagctcggcaaggataaacttttccggctgtggcttaataccgccatgttcaaggcgtgccagctcaaatagctgctgcgacagatgacgaactttatttccctggcgtagcgcgatattcagatactgcttgcgctcctgcgccgtcaggcgatcatccttaagcgataacgtctccagataccccagcagcgaagtcagcggcgtgcgcagatcatgcgaaatattggcaataaattcccggcgctgacgatcgctatcagccaatcgatcccattgcccggcgatctgctgcgccagttcgataaagcggttatgcagcagcgccacttcatttccgggttgcgggtccggcgcctgcgccgccagcgccttaatcgcacgaatactgtcgctatctccggccaccacctgtgccgtcagctggcgtacagggcgtgttacccaataccacgccaggccgccggccaacaggccaaacagcgccaccagcagcagggtccatagcagaaggctccacagcgtcttctgccaggcgttctgtgccagttcattgaaggtttcgccctgcaggataatatagagatagccacgtagctggccgtcaaggcgcagcggcgcggcgctaaacactttttgctggtccatgctgcgcggatcgtcaccataaattggccacgcgccgccggagagaaacgcctgcaccggcgccatggcaatgcgctggcgtttaatgtgccccggcggcgcggcatccgccagcagatcgccatccggcgaaacgaagtacagctcgacgcttgggttaaacaccatcagacggtcgaaaagtggtttcaatgccgcgcgatcgacctcgccgcgcgcgttgagcagcggttcgcgggcggcaatctgctgcgccaggccagctgaaagccgctgtaccatgacgttaccgtactgcgcgctgctatagagctggagtagacaaacggataacgcgcacagcagcagcaaggcgataaacaccaacgacagccgctggctgaggctgagacggcggatcatgattgcgccccggcgctgtagggcgcaaatttatagcccttcccccagacagtaagaataatgtccggctctgccgggtcgcgctctattttcgtccgcagacgattaatatgcgtgttgaccgtatgttcgtagccttcatgctgatagccccagacgctatccagcagcgccagacgcgaaaaaacttcaccgggatggcgggcaaagtaatagagcagatcgaattcgcgcggcgtgaggtcaaccagttcaccgcgcagcctgacctcccgggacagcgggtcgatattcaggccgtggcaggcgatacgtccggcatccatcaagagattttgtcccatcgcttcctgacggcggaaaaccgccttcacccgggcaatcagctccagcagagaaaaaggtttcgccagataatcatcggcccccatttccagcccctgcacgcgctgggtttcgctcgaacgggcgctaataataatcaccggtagatagcgcgtttgctgacggatgcgacggcaaatctccagcccgtcgacgttgggcaacatcaggtcaagaatcaccgcatcccagacgccgttatccagctggcgcagcgcctgcgcgccgtccgcctcgtgcacgatttggtacccttcatcctgcagattcaggcgcaacaaagccgcaatatcatcatcatcttccaccagcaggatttttttactcatcagattcgctccacgaatttcacgctcgtttcataaagcttacccgatttcagccgcttaaagagttcacattttgtttaaacttcacgaaccagcagcgtcagcacttcataatgcgcggtatgtggaaacatatcgaacaactgcactcgctcaaggcgatagccctgcagacgatcaatatctgcggccatcgtccgggcgttacagctcgaataaatgatatacggcggcgccatgcggcttagataatcgcacagttcggcgccgatgccgcgccgcggcgggttgaccagcaccagctgtggaatatcgtcttcatgcgtcgcgaattgcgtggaatccagcgcctgaaaatgaagattggttaatcccaattgggccgcggattgcttcgcgcaggcgatggcttccggggcgatttcgataccggtaaggcgcatctgcggggttgcgcagtgcaggccgaaaccgccgacgccgcaaaacagatcccacatgtggttgaccggcagcgcgcgtacccagtcgcgggcggtagcatagagctggctcgccaccgtcgggttggtctggaaaaagctttgcgggcggatccacagcggtacgccgttaaagttctccgccagcgcctgttgatcgctgaggaaaatctcctgctccccttccatgatagccatatgcacgggctgaatattggcggtaatcacctttagctgcggcaactgctgctgtaaccacggcagcgcggcgcgcaactgttcaagctttgccgcagagcgcagaacgaaacgcaacatcatgccgccgtgctggctttctgtcagcagcaaatacttcagttcgccgcgcttgcgggcaacgttatagggggtgagtccggcgcgggcgataaacggcttcagcgcggcgaaaaccggttcaaaactcggcggatacagcggacaatcggtgagatcttccggcgtgccatcacgatgcagcatgcctagcagcgggcgctctacgctaccgcttacgaccattttcgctttgttgcgaaacgccgtctccggacctgaaaccggagcaagccatgtcgccgctggatgacccgccagcagttcgcgcaggttagccattttatcggcgagctgttgcgtcaatggcaattccagccactgacaagaacggcagcggcccgcgtcgtaaagtgcgcaatgcataagaagaccttcaagaaaaccggggcggggattgtatcaccgttattgcaagcggaaaaaccgtcggcacgacgcagggataaacaatagcgccagcaccagcagatccggcagcttctgcagaaacagcgcatggagaatttcccgctttgactccccggccacgctgaacagttctggatagccgtagccaatcgaggccgcccacagataagagatgacgataatttgcgtcaacaggtagagccagcgcgcccagttgcggcctttcaccagcgaaaaggcgcaccagatctcgataaacaccagcgccaggctcgccagaaacaccagcgtcagggcccaggtttgcacgctacgatggacaaaatcggcaatcccctgcacgccaagctgattgaggatcattaacaggtcaagaccgcgaattaagataatagcaaaggccgccacctgtaccagcgcagggacgttaagacgagcatgagacgatcgagtttttgtaaacaatcccaacgtaaagtcatccatgaaaacggcgccacgagtgcggcgccaatgttaactctattgcagagattataccctaaataattcgagttgcaggaaggcggcaagtgagtgaatccccaggagcttactctagtaagtgactggggtgaacaaacgcggccaacgcacatgcagcttgaagtatgacgggtatagtgggttcagccccttcttgcacgctggatatcgcgcactcgctgcttttctgcgcgagccattaaataccaggcgataaaaccgacaattcccaccacgccgaggattaaggtcgccagggcgttaatttccgggttaacgcccatccgcacgctggagaaaaccaacatcggcagcgtcgtcgcccccggcccggagacgaagctggcaatcaccaggtcatcaagagacaaggtaaacgccagcagccagccggaaatgaccgcgggcataatcatcggcaaggttatcacgaaaaacaccttcagcggcgcggcgccaagatccatcgccgcctcttcgattgacctgtccagctcgcgcagacgtgaagagatcaccaccgccacgtaggcagtacagaaggtgacatgcgccagccatatcgtcaacatgccgcgatccgatggccagccgatggaatgccccagcgcgacgaacagcagcagcagcgacagcccggtaatcacatcgggcatcaccagcggcgcggtgatcataaaagcaaaaccgttggaaccgcgaaaacggccaaaacgcaccagcaccaccgcggcaattgtaccgaggatcgccgccgccgtcgccgcgcaggcggcaatggtcaggcttaaccccaccgcgctcatcatcgcgtcatcatgaaacagctcgctataccagcgcgtcgaccaccccgcccataccgtcaccagcttcgaactgttaaatgaatagataaccagcatcagcatcggcgcatacaggaaggtaaaaccgagcacgaggatcagaatccgccatggcgaacgtactaccggtaagtcattcatccatgatctcccatctgtttttgctgatgcttgtggaaccacatgatcggcacgatcagcaacagcaacatcacaatcgccaccgccgatgctaccggccagtcgcggttattaaagaactcctgccacagcacgcggccaatcataatgctgtcggggccgccgagcagttccgggatgacgaactcgcccaccgccggaataaacaccagcatcgagccggcgataatgccgcctttcgttaacggaacaatcacctggaagaaggtctttaacggcctggcgccgagatccagcgacgcttccaccagcgaatagtcgatacgcgtcagcgcggtataaatcggcagcaccatgaacggcaggtaggcgtaaacgataccgatgtacaccgccagattggtatgcaaaatctccagcggttgatcgataactccgagccacaacaggaagttattgagcaccccgttgcttttcagcagccccatccaggcgtaaacgcgaatgaggaacgaagtccacgaaggtaatatcaccaacagcagcaggatattgcgcgtcgacggcttgctatgcgccaccgcccacgccagcggatagcccaatagtagacagcaaaaggtggaaattgccgccacctgcaacgactgcagataagcctcaaagtacagcggatcgtcggtcagttgcaggaaattgccgaggttgagcgtcaacgtcagttgaccgtcggcccacgacagtaactcggtatagggcgggatcgcccgcgccatttcggccagactgattttaaaaacgatcaggaatggcagtaaaaacagcaggattaaccacagatacggcagcgcaatcaccagcttacgcccgtgagccatctgctggcgcgccagccacagggcaaaaccgccggtttttttgccgccggctggaggttctaatgtgctcatcgccctctccttacaccgtcagaacaacgcagctatcggcatcccagcacaagcgaacttcatcaccccaggtcggcatgcctttgcgatggcgatgttcgttttgcagctgggcgctgatcatctgcccgcttttcagacggacatgatagatagacagatcgccgagataagcgatatggataacctcgcctaccgcaaagttaaagccgtctgccggtggttcgtcgcagagcatgattttctccggacgcagcgccacccagaccggcacgttatccaccaccgaggcatccggatcgactttcagcggatgcaccagccccggcgcattcagtaccagaccatcttccagccgctctttgaccagcccttcgaagacgtttaccgagccgataaactcggcgctatagcgggtcgtcggatgttcatagatctcctccggctcgccgatctgcacgaacttaccgcggttcatgatggcgatacggcccgccatggtcatcgcctcttcctggtcatgggtgaccatcacgcaggtgacgccgacgcgctcaagaatatccactacctcaagctgcatccggtcgcgcagttttttatccaatgcgcccatcggttcatcaagcagcagtaatttcggccgcttcgccaggcttcgcgccagcgccacgcgctgacgttggccgccggaaagctggtgcggcttgcgtttggcgaactcctgcatatgcaccaacgccagcatctcctggacgcgggcgttaatctccgcctttggcagcttgtcctgcttaagaccaaaggcgatattttgctccaccgtcatgtggggaaatagcgcgtaagactggaacatcatattgatcggccgctgatacggcggcacgcgcgccaggtcgacgccatccagcacaatctgcccggcggtgggcaactcaaaacctgccagcatacgtagcagcgtcgatttcccgcagccggacgcgcccagtaaggcaaagatttcgcctttataaatagtgaggttgacatcatcgacggcgtgttgcccatcgaaggatttggttaaattacggatttccagcagcggggtcagcgctttggggctttcgcctgtgggcggggcattgcgtcattcactcgggtgctctccggcaaatacaatcaccgtatggcccggttgccatacattcttcagttctatgtccgccagcgaacagcaggtcagacctttacaggcccggcgtaccgggcctgacggcgttattttccgcttttcactttggtccacgcgcgggtgcgcacgcggtcaatcttcggatcctgcaccttgagggtgaacagcttggcgaagacatcctctggcgggtaaatcgccggattgttgcggatgtcggcgctgaccagcggcgtcgcctctttgttagcgttagcgtagtagacgtgatcgctgatatgggcgatgacctccgggcgcagcagatagttcaggaactgataggcttcgtctttatttttggcatccgccggcatggcgaagacatcaaagaaggccagcgccccctctttcggaataaagtaggagatattgacgccgttcttcgcctctttggcccgattcgccgcctgccaaacatcgcccgcccagccgatagcgacgcaaatatcaccgtttgccaggtcattgatatattgcgaagagtggaagtaacggatattgggccgcagcttcagcagcagatcggttgccggtccggtgtaatcatcggctttggtgctgtttggatctttgccgagatagttcagcaccgtcgagaaaatctcttccggagcatcaaggaaggagacgccgcagcttttcagcttctcaaggttttccggcttaagcaccagatcccagctgtttaacggcacgtctttacccagcgccgctttcactttatcgacgttatagccgatgccggtggtcgcccacatgtatggcatcgcatatttattatcgggatcgtgacgcgccaccagttgtaaaactttcgggtcgaggtttttccagttcggcagtttgcttttatccagcggttggaataccccggccgccagttggcgttcaaggaagcttgccgacggcaccaccagatcaaacccggtgctgccggccattaatttaccttccagcacctcgttggagtcaaatacgtcatacaccactttaatgccggtctctttttcaaaattggcaaccgtgtccggcgcaatataatcagaccagttatagacgtgcagcgttttttgttccgctgcgagcgagccggcagaaacggccatcagcgcacccgtaatcacacctgttaaccattttttacccaaggcggtcatatatctgtttccttctcaaggcccgttaattcacggacgcaatagacgaacctgaacgcatgcaagaatcatgcatatttttcattgcctgagataaggagaggaaacctctccctgattggctgcccgcaaaaggacgcctcgccagaataactgtagccagaataagaggatatagcccaggcaaaaaaacgccctggatcatatttccagccaataaaggtctacgagataaaagcgaagcggtaaaacagcagtgaataattctttaaagacgggtttgagacagaataaataagcaaccgccatcgcagcggctgcttttattaattagtgcagaaaatggtattgcacttcttcggctgcggcctcttcttcctgctcttccgctttatacagcagttgattggcgccagcttccagaatgaccatcgagacctgctcttcgctctggcggaagaaccaggcaaactgttcgagagtgacgcccgcgccaacgggcagcgcctggcagaccaccagcttcggcaggttatcatcctgaatatcaaggaacgcttttacggttagcgaactggcgttaatcgccgacaggtccgccgatagcggcagcagcgcagagggcttcacttccgccagcgcagaaaacagcaccacgttgtccagcaggtcgattttggcatcgaaaataccgtcgaaattctgcatatgcggcaggtgcaacgcctggcaggagtcgcactcaaaaaaactgatgcctaactcgtcgagccaatgacgtaacgtatcaagacccggaacgaccagtgaatccatagtgcctgtgacctcttgctggataaaaaacgacgcatagcttacgcaaaaaatgcgtcgcattccatgaaaggataacgaagtgacgctaccctcccatttttagacaatatccaggcgttgcctgacgctcgatccacgcgatcatacgtccggcaatatcgacgtgagtggtggtttcaatcccttccagccccggcgaggcgttaacttccatcaccagcgggccgcgatgcgcgcgcagaagatccacgccagccacgtccagacccagcgtttgcgccgctttaatcgccatctcccgctcctgatcgctgatcgtggccgtagtggcgacgccgccgcggtgcaggttagaacgaaaatcgccctccttcgcccgccgttcaatcgccgccaccacctcatcgccaaccaccaggcagcggatatcgcacccttttgcctcagcgatatattcttgcaccagaatgtgcgcattgaggccccggaaggcgtcaatcacgctttccgccgcctgtcgcgtttccgccagcaccacgccaatcccctgcgtcccctccactaacttcaccaccagcggcgcgccgccgaccatggcgatcagatcgctggtgtcgtccggcgagtgagcaataccggtgaccggtagatcgattccctgacgcgccagcaactgcagcgagcgcagcttatcgcgggcgcgggtaatcgccaccgactcgtttagcggatagctgcccagcagttcgaactgccgcagcgcggcggtgccgtaataggtgatcgccgtgccaatacgcggaatgactgcatcaaaatggggcaactgtcgccctttgtagtgaatcgaggaggcaaccgggctgacgctcatatagcaggagagcggatcgaggatctcgacctgatgcccgcgtttttgcgcggcttcacgcaagcggcggcaagaataaagcgttccatcccgggataatatagcgattttcacccaacacctcttagaaaataactggcggccagcactctgcgtttgcaggttgaagtgtatagggaatcagcgcgttgcccagccctgtttatgcaaataatcgagaataaacggccggctctctttgatgatggtgcggcggatatgatcgctccaggtatcgcggcgggtattgctgccgcgcgtcagataatagtccgccagctgttcgtcatactgcgccagcacctgttgatcaagcggctggtagtgattctcatgcaccagcatcgcaggcggaatacgtggcttaacctgcgggtcgtcagcaggccagccaaggcacaggccaaacagcggcaacacgtgtttcggcagctgcagcagctcggttaccgcgtcaatgttattacgcaggccgccaatatagacgccgcctaatcccagggattccgcggcgattaaggcattctgcgccattagcgcggtgtcgacgacgcccagcagcagctgttcagccagtcccaactgcgcttgcgggcaaatttgcaggtggcggttgaaatcggcgcagaatacccaaaactccgctgcctgcgccacgtgctgctggccgccggtcaactcaaccagctgctcacgcatctgcgggtcggtaatgcgaataatcgaggtacattgtaaaaagctggagctggaagccccttgcgccccggcaatgatcgcctcacgctgttggtcgctaatcggcgcgtcggtaaaatggcggatggaacggtggttacgcagcagatcaatggtcggcgtcatggtgtttttctcgttcggacggggtagaagatgaggtcttattatcggtcaactgcggcgcgacaattttcgctattcgccacattaaggctatcgccgccgggatcatcagcaggatcccggcaaagatcatgatgagcgccgccgtcgggctggcaaatggcgcaggcagttgaacatactggtttaatgacagccaggccaacgtcagcagcgccatgccgacgagctcaacaatcagaatacttttgggtaatgcggcaggcgatcgcataacgctcctcaatatactcatgccgcgcacagcgcatcgctggcgcatctgtatagggtcttgcagcagatgatattgatcaagcataacccgcaaccatcgctataaaaggtaaaaccttcttccccttgctaacggaacgcggcatcatagccacattcgccatccggctgagatttaaggagagaagcatgtttaccgttatttttggtcgcccaggttgcccatactgcgttcgcgctaaagagctggctgagaaactgagcaccgagcgcgatgacttcagctatcgctacattgatatccacgcggaaggcatcagcaaagccgatctggaaaaaaccgtcggtaagccggtcgaaaccgtaccgcagattttcgtcgatcagaaacacatcggcggctgcacggatttcgaagcctgggcgaaggaaaatctcggcctgtttgcctgagagacttcactcttccgttgagtgcctgcgtctggcgtccagccagacgcaaataaataaaaagcatagcgccccgagcgcgcaccagaagaccgcgctaaaaagccacgccagttcctgccaaaacgatcgatgagtaataaagaacatccgcatcaccaccagacaaaccggtgccgccagcatggcgccaatcagcggacgtatgacgcgccttccggggataaacagctcgccaccgcgccaggtagcacaaagaacagcagtccaagctcggggttgcccgtttgccgaaaagcccctttcatatgcagcaacagcgataaacagaccacaataaacagaaagaacccacaaattataccggcccacgcgcgctcagatttcacgacatcctcctgatttcgcctctaactatctttcacttcatccagtcagaaatagcattctggcagtccatgcttataacgctcccgtcagagtaaaacgattgtgactagccgcagcaaccaggaaagattaaactagcggcactgttttatcggtattaacgggatgccagaataacgttcggcatagtgcgaacgcttgagcaaccttagaccaaaaaaccatttccttcaacaacttactagtaaacgagaagttggctttcgtgaatataaacgtcgcagatttgttaaacgggaattacatcctgttattgtttgttgtactcgcactgggtctttgcctggggaaacttcgcctcgggtcagtacaacttggtaattccattggcgttttagtcgtttctttattattaggtcagcagcacttcgccattaacacagatgcgctaaatcttggctttatgctgtttattttctgcgtcggcgtcgaagcgggccccaactttttttcgatttttttccgcgacggcaaaaactatctgatgctggcgctggtgatggtggccagcgcgatgttaatcgctatggggctgggcaaattgtttggctgggacatcggcctgactgccgggatgctggcgggcgccatgacctccaccccggtgctggtgggcgctggcgataccctgcgccactttggcatgcccagcgatcagctggcgcagtcgcttgaccacctgagcctcggttacgccctgacctacctggttggcctggtgagcctgatcgtcggcgcgcgctatatgccgaagctgcagcatcaggatctgcagaccagcgcccagcagatcgcccgcgagcgcggtctggataccgacttcaagcgtaaagtctatctgccggttatccgcgcttaccgcgtcggcccggaattggtcgcgtgggcggacggcaaaaatcttcgtgagctggggatttaccgccagaccggctgctatatcgagcgtattcgtcgtaacggtatcctggcgaacccggatggcgacgcggtactgcagatgggcgacgatatcgcgctggttggctacccggacgcccatgcccgcctcgacccaagcttccgtaacggtaaagaggtgtttgaccgcgacctgctcgatatgcgtatcgtcaccgaagagattgtggttaagaatcataacgccgtcggccgccgcctggcacagctgaagctgaccgatcacggctgtttcttaaaccgggtgatccgcagccagattgagatgccaatcgacgataacgtggtgcttaataaaggcgacgtgctgcaggtgagcggcgacgcccgccgcgtaaaaaccgtcgctgaccgcatcggctttatttcgattcacagccaggtgaccgacctgctggctttctgcgccttctttatcgtcggcctgatgatcggcatgatcaccttccagttcagctcgttcagcttcggcatcggtaacgccgccggcctgctgttcgccggcattatgcttggcttcctgcgcgccaaccatccgaccttcggctatatcccgcagggggcgttgaacatggtcaaggagttcggcctgatggtgtttatggccggggttggcctgagcgccggcgcgggtatcaataatggtctgggcgccattggcgggcaaatgctggccgccggtcttatcgtcagcctggtgccggtggtgatctgcttcctgttcggcgcctatgtgctacgcatgaaccgcgcgatgctgttcggcgcgatgatgggcgcgcgcacctgcgccccggcgatggaaattatcagcgataccgcgcgcagcaacattcccgcactcggctatgctggcacttacgctatcgccaacgtactgctcacccttgccggtacgctgatcgtcattatctggccgggccttggctagccccggccgaaaatttttaactttttcgcaaaaaaatcggtgatgaacagaactttttcccaggatgtcagtcataactagtgccactgcttttctttgatgtccccattttgtggagcccatcaaccccgccgtttaggttcaaggttgatgggttttttgttgcctgaaatttagcttccttagaatcaacctcttagcagacaactcgtttctgcatgcaatgaccttcccgtgaaaaccgcacccgtcttaacagcagtatctggtcttgctttctcctcgcagaaaagtgcttccttaacgcctgatagttactgctattgaattgacgtacttatcctgctatgtaaaaacgtagtgttgatactttacttcgactgataaggaattcagatgttaactcaaagtcttattaatatattcagcaaagaaataatagggacagttatcaccgccctgcccatcataaaagccatcttaaattacttaaacaaacctttagatgacatcgatgatatatataaaaaagccaaattaagcacatggcgaattcgatttttcatgatcaaaataccgacaaaagagatacccaggctgactcgcgcaaatgtgatattgttttccatcgtcttattatttctttttggcagcttagcaaccagttcatattatggcgtaaagctattacaagtacgtccgggctggacatctttaattcttaaagaaacggatgagtggtttttaatctcggaaacagaagcatcagaacacgcattccatccctcctggcatctcacagaaaaaagctgtatctctggcgaggccacgcaactggcaaatgacaaaataataacaccacaactgaggaggtttatttgtgattccttcaccaatacggatgacaaagagaacataatgaaatccattaaagataccactcacaataaacctgtcatcacctttctcatctcgatcattaccgttggctgcatatggttcataaccagcttaatattgacgttaatatatactctcagacttaaaaaattcattatccgggagcatgaaaaagcctatgactatctaacatagcactccagactttagcttagggggtgagaactctgttacatttgtcatttgcacgacgtatattatcagttccggtaatattgttactggaactgcagagcctatcatcctgtgataattattgatattattgtccgcaacgattaagaggtatatcggttgaaggtaaaaacatgattgatgtacagcaggaacaaaaacttcaggagcacggttttaccagcaaagagatcaatatgctgcgtaaaggacttgagagtccacaacgtaaagatcaaagcctgcaagccttgttggtggagctaaggcgtcgtttttacatgtcctgtatcattatcattgccctgcttatcttttgcatctacgcgatgctgaataatgataccggtaatgggctggcttactttgctgtgactgcagtttgctacaccttatccgctctcatggaaagcgataatattcttaagaaagaaactctacccaaattaatttaacaagcaattttttcatcagtacgatatgttctccctatgttgtataactgatatatcctcaacatgccacttaaatatccctcttaaataatcggcgataaagcttatcaagcacaccagcgtaaaacagatggcgaaaccatccagcttgaataaccagccatccagagcaataaaacaaaccacagcggcgatagagaagcagcccgttccgacagcttcaaacatattgattgcatgaatgcagatctttttacaaacatagcttgaagagaatctttttggtttcattggctctctcgtatccctgcatcaggtaacccaaggctaatcaaaagcgcgtctattggccagtaataattaaaatattttcttattaaatcaacaagttaaacaaacccctaataaagaaaatcaatcactaaacgtactttccccctccttgcacagtctattttttcacccatactttgctgatcccagtcccacataaggcgctcttcatgttgcttaaagataagaccgtggtgattttcggcggcagcggcgcgattggccgcgcggcggcgctcgccatggcgaaagaaggcgcgcggatctttctggccgcccggcaggcggataagctggaaaaggcggcggctgagattcgcgccgcaggcgggagcgtcgagaccctgcaactggatgtgctggatggcggacaaaccaccgcgcaggtggccaacctggccgggcgaaccggcgggattgacatcgtggttaatgccaccggctttctccacaatcaggggaaaacgctggcacaattatcccttgccgagtatcaccagggttttgtcccctttcttgatgcccaatttactattgcccaggctgtggcgccgtggatgggtggcgaacgcgagggcgtcattattaccactatccctccttccgcgacgatggccatccctggacacctcggccatatcgtcggctgcgccgcaatggaagcctttatcaaagcattggccagcgaactcggcgcgaaaaatatccgcgtgctcggcgtacggtcacacgcaatagcggatgcggcgctggcgggttcttatactgccgaggtgtttgcgcctaaagcacaggcgttgggcttgagcgtcgaacagtggttgggcggcgcggcacacggcacgatgctgcagcggttaccaacgctcgcgcagatagccggggtcatcacctttctcgcctcaccatcggcggcggcgatgaccgccacggtggttaacgtcaccgcgggggcgacgctcagctagcgctattctcccccgccagccgcccgaccattaagcgaatcgccgctttcgacagcggcgcgctatcggtgacgaagtgcagcgtcatcccctcgataaacgcatccagcccgcgcgccgtcgccggttcgaaccactgctccagcgtctgctgactgcgcagcatccagctctgcatgaccgttttcagcgctggtcggctgctgcaaaacgcgtacagctggtacattaactccatattgcgcgcggtggtcacctgggcgctgaagataagctcggcgatagcgtcgcaggcctgctggcggctgccgacgccgtcaaaaaattgctgatactgcgccgacatttcgacggtgaagttacgaaacgcctcctcaatcagcgcctcaagaccgctaaaataataggtcaacgagcccagcggtaccccggcgcagctggcgattttacggtgcgttaccgcatgaattccgtgcgcggcgatggtatccaacgtcgcctgcaggatgcgctcgcgccgctgcggatcgttcggtctgcgggtcatcggtgtgtttttcccctctgtgcgctatgcaaatcaagcgatagcggaatgtgtacaaatgtacacaaccttgttactgttgtctgcaactcttctttctcgggcgtttatggatgacggcgcaaacttctcgcaaagccctccagcttcggctgtgggcgctatttatgttcttctttattcccggcttattgatggcctcctgggccacccgtacgcccgcgattcgcgatttactgaccctttccactgctgagatggggatggtgctatttggcctgtcgattggttcgatgagcggtattctctgttcagcatggctggtgaagcgcttcggtacccgtaaagtcatccgcacaactatgttgtgcgccgtggcgggcatgctggtgctgagcctcgcgctgtggctctcctccgcaccgctgttcgcctttgggctggctatctttggcgccagctttggctcggcggaagtggcgattaacgtcgaaggcgccgccgttgaacgggaaatgaataaaaccgtgctgccgatgatgcacggtttttacagcttcggcacccttgtgggcgctggcatcggtatggcggtgaccggttttggcctgcccgccgcgccgcatattctgatcgccgcgctggtggcgattgcccccatcgttatcgccattcgcgccatccccgacggcacgggcaaaaatgccgccgaatccgcccacagcgaagccaaaggcctgccggtatggcgcgacgtgcagctgttgctgatcggcgtgatcgtgctggcaatggcctttgccgaaggttccgccaacgactggctgccgctgctgatggtcgacggccacggctttagccccacttccggttcgctgatttacgccggtttcaccctcggcatgaccctcggccgcttcaccggcggctggtttatcgaccgctacagtcgcgtcaccgtcgtacgcgccagcgcggtaatgggcgcgctgggtatcgggctgattatttttgtcgacagcacctgggttgccggggtatctgtactgctgtggggactcggcgcgtcgctcggtttcccgcttaccatttccgccgccagcgataccggcccggatgcgccgaaacgcgtgagcgtcgtggcgattaccggctatctggctttcctcgtcgggccgccgctgctgggcttccttggcgaacattttggcctgcgtagcgccatgatggtagtactgggtctggtcatggtggcggcgctggtagcccgcgcggtagccaaaccgcagcctgaacctgtgatggagaatagctaatgagcatcaaactgattgcggtagacatggacggcacctttttaagcgatgccaagacctataatcgcccacgttttctggcgcagtatcagcgcatgcgcgaacagggcattcgcttcgtggtcgccagcggcaaccagtattaccagctaatatcgttcttcccggagctggtcgatgaaatcgccttcgtcgccgaaaacggcggttgggtagtcagcggtaaagaggatatctttaactgccagctgccgacgacgcatttcaacgccgtcgtcgaccacctgcaaacgctgccgcatatcgaaattatcgcctgcggcaaacgcagcgcctatacgctcaatagctataacgacgagctaaaagcggtggcggcgaagtactatcaccgtctcgaactggtggatgattttaaccatctcgatgacgcgatcctcaaattcggcctgaacgtgccggatcatctgatcccggaaattcagccgaagctacacgcggcgctgggtgatatggttaccgccgtcgccaccggctacggcagtatcgatttaatcatacctggcgtgcataaagccaacggtctgcgcattttgcaggagcgctggggtattgataaccatgaagtggtggccttcggcgatagcggcaatgatattgagatgctgcagcatgccggttttggtttcgccatggcgaatgccaaagcggaggtcaaagccgtcgccagtcatcatgccccgcataataacgaagaaggcgtattgcatattattgataaggtattgaatcgcgaagcgccgttcgcctgatgagaaccaggatgcctttgggcatccgggtttactacgtatcacgcctgctgcgaactgccgacgcttttatctttcaggaaataaataatcagccccagccatagcaccccgcccaacaggttaaacaggctgaacaggccgttaccgccaagctcataagcatgcttgctaagctctatgcccacggtaaagatcagcatctgcaacatacccatcgccgccgaaaccgtccctttactcatctcgctggcgaacaacgttaagcgcaccagcccggcgttagccaggccaatcccgaaagcgtagaagctcaaaccagcggtcatccacagataagcatgggacgagacgactgtggccgccgccgacaggagcaggccaaacataatcggccagccgcccataatgatcagcgaacgtaccgagcggcgcgaggtcagtcgcgccagcaccaggttgccggcgatcagcgcgccgaaaatcggcacctgcagcatgccgtactcatagctggtggcctgctcgccgctgatgataatcaccggcgattgcgcaatccacgccagcagcggcaggctaacaaaaccggtcgccagcgccccggcgacaaagcgcaggtttttcaacaccagacgatagtcgcgacccagctcttttaccgacagcttttcccccatccgcgtcgccgtttccggcatcgcccgctgtagcccgataaaggagatggccgccagcacggcgaacagcacaaacatcatctcccacggcagcatatgaacccaggcggcgccgaccagcggcccgagcagcggcgcaatcagcgcgacgttagccatcaaggcggtgattttgatacacaccgcctcctcaaacgactcctgaatagccgcatagcccaccgcgccgataaagcacaggctgatgccctgcaggaaacgcagcagggtaaattgttcaatggtttgcgccaacagcgtcgccagacaggtgacgataaaccacaccaccccggtcagcatcaccggacggcggccaatacgatccgacagcggccccagcagccactgcaaaaacatccccccgccagataggcggtcatagaggtggggacccactcattgccgacctgaaattcctgcaccaccgcgagcatacccggttggatcatatcgttgccgatataggtggagaattcatataacacaaggcacagcgggaacagcaacgcctgacgaccgaggcgcttacctgataacgaataattctgcatgcaatctcttaattaaaaaaaaatcgcgcaaagtttaatgaaagtcgacccgtggagatagtgaattgtgagtgacaatgaaaaatatcgccagcccacattccggcatgaaacgaatatttatatttcgtttatgtttcaatgagattacagccgatatacttgctatggcgaaataccgtcaagggcatctcacgggtatatttcgtaacaaactgataattaagacaatgctgctttaccttatcgttacctttcaatatggtgagcggcttattgccatcgtaagcagagactggaagcatgctggaaaatatcaactacgcgctgtttgccctgattaacgccaccccggcctcctcgtggtgggcgattgaggtcgccacgtttattgccaaagacttaattatcattgtgccgctgctggtggtggcgctgtggctgtggggccaaaccaacgtcaactggtattcaaggtcatgctggccctggccctgagcctgtctatttcgtgggttatcggtcatctgtttccgcatgaccggccgtttgttgacggcgtcggctataacttcctgcatcatgcggcggatgactcgttcccaagcgatcacggtaccgtcatctttaccttcgcgctggcgtttttattctggcaccgggtgtggtccggcgcgctgctgctggtcatcgcctcggcgattgcatggtcgcgcgtctatctgggagtacactggccgctggatatgttgggcgggctactggccggcatgtgcggttgccttggggcgcaactgctgtggcagagcggcggtcatggcctctaccaatggctgcagcgcctgtatcgtctctgcttctcgctgccgattcgtaaaggctgggtacgcggctaacgtctgacaggtgacgaacccctcgccgccgggtaaaatcaagctgacgccctgcccttgcagggcgattttagctcagagggtatatggaaactcgtcgtgacgaacgcattaaccagctcattcaggcactcaagcgcagcgataaacttcacctgaaagaagcagcttcgctgcttggcgtatcagaaatgaccattcgtcgcgatttgaacggccacagcggcccggtggtgctgttgggcggttacatcgtgctggaaccgcgtagcgccacgcactacctgctgagcgatcagaaaacccgtctggtggatgaaaaacgccgtgccgcgcggcatgccgccgggctgcttgaagcgcatcagatggccttttttgactgcggcaccacgacgccatggatcatcgacgccatcgataacgagctgccgtttaccggcgtgtgttactcgttaaatacctttctcgccctgcaggaaaaaccgctgtgtcgcgctattctgtgcggcggcgaattccacgccagcaacgccatctttctaccgctcagcctgcaggataccttgagccatctcagcccggatatcgcctactactccgccgccggtatcgactgcgagcaaggcgcgacctgttataacctcgaagagctgccggtgaaacactgggccatgaacaacgctcgctaccatgtgctggtggtcgatcacagtaagtttggcaaagtgcggccagcgcggatgggggagttatcgcgttttgacgtcatcgccagcgacgttcgcccggatgacgatctgttggcgctggcgaaagaaaagcaaatatcactgctgtactaaccgcgccccgtagggcgcggcctgtctcttaagagaaccagctgccgaaccagccgtgcagtttcatcagcacgaagtcgaccatgcggctgaagaagcctccctcttttacgtcttccatgacgatcagcgggcgctgttcgatagttttgtcattgagtttaaagtcgatggtgcccaccacctgccctttcgccaacggcgctgtgagctgcggctcagtcaggttgtagctggctttcaggtttttcaactgcccgcgtggaatggtcaccgaaccggcttcgccggcgcccagtttgacttcattactgtcgccgaaccacacgcgctgggaaataaaggtggcatccggtttgattggcgtgacggtttcataaaaacggaagccccaggtcagcagtttctcggactcgttaaagcggatacggtcggttttagtgcccagcactaccgcgataaggcgcatatcgccctgggtcgcggaagagaccaggttgtagcccgcgccggcggtggtgccggttttcacgccatcggcattgaggttggtgctccacagcagacggttgcggtttggctgacggattttattgaaggtaaactctttttctttgtgtaccgcgtactcttccggcacatcatggatcatcgctttggtcagcagcgccatatcgcgcgcggtactgaactgccccggcgcgtccaggccgtggacggttttaaaggtggtgttggttaggccgattttctgcgcgtaaccgttcatcagattgacaaacgaatcctggctaccggcgacatagtcggcgatagcgatgctggcatcgttaccggactgaattatcacgcccttattgaggtcttcaaccgatacctgcatgcctggcttcaggaacatcaccgaggagccacgcagcgccgggttgcccgtggcccacgcatcgcggccaacggtaaccgtatcggtcagtttaattttgcctgctttcagcgcctggcctaccacgtaactggtcatgattttggtcaggctggccgggtcgagtttctcgtcggcattaccttcactcagcactttgccgctggcatagtccatcaggatccaggctcgcgcatcaattgatggcgcatcaggaagttgatccgccgcctgcactgcaggggccacgagaagtaaaagcgcgcagcctgccgcgaggccgcgaagggaaaaagcatcatgcgtcataagagccacccaagtatcctttccaaacaaaatatgccgcaacactcttgccgcacagcacaaggcggtgagtaaagcgtacaaatgaccttaaagaaacagcgagttggtaaagtttttaaagtttacgcaataacgacgctgcctgctgaaaacaaggcaatttttttgatcgtgattgccttaatattaactttattccaacatgattgctcaccatgttgcaacggcgattaaataacatgcaggagcggatatgattacgttatggggcagaaataactcgaccaacgtgaagaaagtgcgctgggtgctggcggaactggatcttccttatcagcagattctggcggggctggagtatggcctcaatcacgacccggagtatctggcgatgaacccgaacggcctggtgccactactcaaagacgatgccaatgggctggtgctgtgggaatccaacgccattattcgttatcttgccgcgcagtacgggcaaaaccgtctgtgggtggagtcgcctgtgcagcgcgcgcagggtgaaaaatggatggactgggccaatgctacgttgtcaccggcgcaccgtccggtattaatggggctggtcagaacgccgccggaccagcgcgatccggcggccattgaggcaggtattaacgcctgtgaagggctgttcgccatgctcgacgatgaactggcgaagcatacctggctttccggcgatgagttcggccttggcgatgtggcggtggcgccgttcgtttataacctgctttccatcctcgacagctggcagccgcggccccatctgcagcgctggtatcagcaaatccagcagcgccaggccttccgcgacgtcgtcatgatcccggtcacctgagatgattactccgggctgaccttgagcagttcaccgtcaggctcgtcggttaacagatacagataaccgtcgggcccgacgcgcacatcacgaatgcgtttgccgcgatcttttaatagccgcgtctcctcgctgagggtattgccgtccaccgagagcacaatcaaagactcatccttcagcgcgccgataaacaacttgtgccgccactgcgggaaagtcgacgcgttgtaaaacgccattccgctcagcgccggggaggccggccagacgtgcagcggtgcctcggtattcggcgcgctctttcctttagcttccgggataggttgaccgctatagttaatgccgtgcgtcgccagcggccagccgtagttttttccggccaggggaatattgatctcatcgccgccgcgcgggccatgttcgttcagccacagcgtatcgctccacggattcatcgccatcccctgcgggttgcgaataccataagcccaaatttccggtctgatgccagtacggccgacaaaaggattatctttggggatttccccctgttcggtcaggcgtaccaccttcccctgcagcttatcgaggtcctgggccgtcgggcgctgattattttcgcctaaaccgataaacagatgccctttgccatcaaagaccatccgcccgccgaaatgattgccagtagagagcttcggctgctggcggaaaacggttttaaaatcttccaggttttgcaggtcagcgctgaggcggccgtaccccaccgccgtccccgctttgccgtcatcgcccgcttcggcatagctcagccatacccggcgcgactgagcaaaatccggcgccagaaccacatccagcaggccgccctggccgttggcccacaccttcggcacgccgcgaatgggcgccgataatccttgatcgagctgccagcgtttaagttcgccgccgcgcagggtaatcagcacgccttcattgtccggcaggaatgccaatgaccaggggtggtcgaggttatcctgcagtacctcaacgcgcggcgcggccatcgccgccatgggcagcagcacagtcataagtgttattttgagatatcggcgcatggcgcactcctttcgtcagcattgctgataagggtagccagcgtgggcggtcaggcagggatttttacataaactttaacagggggagtcacctcccctggattcaggcgtgggtcattggcgctgagttattcagaatgtgaatattcatcgtcaatcccgacagacagcgttctagcttctctacgttaacggcaatataagccgggcaatcatggtgcccgctcatcaggcaaaccgccgccgaagcgacggactcgccggcaaggcggaaggcttccatctcttccggcgcgatggcgtgctgcaaacgcggcgcgtgtacgcgcagttcatggcatagctcaaacaagttatcacgcagatggtcattttcgctgactgacatatagcctttcgctttacgaagctggagataagccgccaaatcgatattggcattaatcagcttattcaaaaggttagtgtaacgtctgtcaacgctcatcacggtcctcctctgtcgtccattaccataatcatagtatggtcattttttgtgcggaatcatgagcgaggtcaataatcacacagcaattaacattatttacaatgttacaacctgggcggccaacaacgcggcttaaacgcctccgctgcgctaacgctttttcatcattcatcgccgcctggctatactctttttcgcaaagatctgtagaattcctgccctgaccattccaataaatgaacattttttaagctatgagcaatgtcacgcaccagccgaaaatcggcttcgtctccctgggctgcccaaaagtcaaaaataatacattgcctctttagcctatttgaaagcaaaaaccccgccgaggcgaggttctacgtggagttggtgctgaccgataaggcgacttcgttcggccttacgtcaggcatctgcggcgctggagctatcttgtgtctcagactgtatctcacttagtgggacagataaagacaaaagaaaaattgtaccccccaacctctattgcaaatacaagccattattgaaatttaatggtcctcgtttgagaagggaggtaaaagtcagtcaagagcattactagtattaatcgtcggagagtaggccgttacatccatttgtcagcgttttctgttaccagcagggtgcacaatcactaagggactcaaggacaagctttggccgatgccagtcttggcactgtctgctatgtatgattagatctgaaacccctatcaatccctcaaggaataaacatggctcgcccttccatgaaagccttagtcgatttactaagtgagtcgcccacctcaccaccacccgaaaaatggcaggatctggaatcgcatgttcaagacgtatatcagcaactactcgatattcaaggtaacaagaccatggtagctcgtaatgtgcagatttcaggtagggaaggaagtagctatcagatagacgtttactacgaatttgagatggcaggtatacgtcatcgcgttgctgtggagtgcaagaaccgctcccgcccattggagcgagatagcgtattagcctttcattcaaagatacatcaatgctgcctgagtcatggaattatcgtttccgcaggtggtttccagacaggagcgcgtgagttcgctgaaaaaaataacgttacactcatggattactcagagctgccttccattggcaatcttctttctcgaagactgacaaatgtagtcattcccgatgaggatacgattggtcagcctttctggactatttttgatactgaggaatactcacctttcgggcatgtcgacgcaaagaacgaaataacgacggcctttttgttcctttccaaagttcatgcccagcggtttctaaaggaccagaacttaggctccaaatggcaggttaggggaatggctcaaagacatctctcctgctacatcctaacctgtgatgcgtttaacgcaagatatgtcattgctcggcctgggtatgctgctggcgtgcccaaaaatcagttcttgttcgatgaaatcctgagaaaagacttgatcaacgattttcacgagggcattgatttgccaaaggagccaaatatcgcgcccggataccgttcaatattcagaaaaaaaacagtctgataatacagttttgtaacagaacaggcatagttaacgctctcagataactcatataaaattgattatgctattcttgcgatcatttatcgggtccgctctgagcgaatagcggcccattgctattaggccgctcgcaattttaacttcagccaattcgagttttaaactcattaatccatactatgagctccaatacatctttttcgaattcatcgagttcaaccggaaccagaggaagctcatcggattgagagtgctcgtacactgaatatttggtcatcagtgcgtcaataagatcacagtcagctactattaccttggcgataccccttagctttcctttggtcatgacatcacgtctgaaacggacaactacatcattcaaaagaacgaattctactattcgttccaagattatccgaaaatcgctgcatgcactttttgctgtaaggtcataaacatcggcatcagcatcagcttgatgctttttgagcttagggatgacatgatccctaatcatattaagcgccttgtcaggcttggcatctcgtaagctgtgttgcgccaagattcccgaagttttatctaatcttctgagggactgcacggtatggttaattttctcattagccggattctcagcgtgctttttaattacagcttcaatgatggaaacaagcgaaaggcggtgtgtgaagattatgacctgtctggtcttcgctaactcgacaagcctagctacaacccgctcttcgaagtcttgatctaatgacgaaatagggtcatcaaagatgaagggggctagctgattcgaaccagtcgtatctgccaagaatgccgctaatgcaacaatgcgagcttcgccttcactgagtattacatcaggagtgaagccagctcgagccccgacaagggtgagcccaaacgttattactccttttccttgagctttgctctgcggcacaaccggtaaacgccgcccaccaagagcctttaactccgcatcaaaacggctctgatatccagcatcaagctcagttctccctagttcggtgcgcttagttgtcaaggaattgctggccgttaatctcgtagctttatctagcaaatctactgcaaccaagcgctcacgctcggcgagaatagccattttgttttgacataaccactgcaaggccttgagttgcttaatgcgcttttcaagttgctggcgctgtccatcttgctgcaattgtgtcaaactaatcttctcagcatttaagtcgacagcgcgtttttccactgcttgatcaataagcccccaatcgaatgcggtgatcgaaccaacggcggtacacgcctcaaactgtgagcgccttgctttcaacgtttcataagaggcacgagcaaaggtttcatcaaatttcaattgagccagccgggcaatccaatcctctatagaaggtaactgaaccaccttcgcaatgagctctgcgctagtggtttccgcagtttttgccgtggtctctaagccagctgtaacgaaagactcaaaacttttgagtcgagctgaaccttcctctgtgagttcctgttggcaaagcacgcaatacgcgcctccagtagtaacgggaaattcgcgactatggtaagcatgagcaatagagtagtttcgcgcttgatcccacattagtttccaagccgtttcgccaaggccttgcagaggagcagttgcgaatgcctgctgcgcaactatattggcagcctttctcgctgcaacagccaagtcttttgccttaaacaactcctcggctttgccatccgcaaggccttccctcaatagactcatggcttgcttaacgttttctgaggctatctcttccttagcaattgcaatcaagcgccctttgatgtctttctctgctaacagagcttcacctttgatacgctcatcttccaaatcatttccatattggcaaaacgactcaatgttctcagccgaggttgatgctttaagagaggagaaccaagcattttcagcggtatctgcaaggtcactggggaaaaatggaagagcacggacaagcttttccttctcccggcttaattgctcagaaaccattcctgatatctgaatgagcaaagatataaaacgcatgctgctcggttcgtagcttgattcagtgcggcccatatattgagtcgcagttttcgagtcaaatacttgggcatacttgagcatcggatgtggctcagcccccgcctgccaattgatttctacgagtttaccgtcgatagtgatccgacattgagcactgcatgtatgtacctcgttgttgaatacattggggcggatttcgtcccttgaacgtgatccgcagagttgtttgagcagacgagaaaaactactttttcctgagccattctgtccatagataacagccaaactgccagccccaaatggtaaggatgcccccggtttgatagcatttacaccatatacttcgcttaactcttcaacacgtacaactcgctgtaataatcctgccgagaatgcgcctggcgctaccttcaaaaacccagggtcattctgtttagccgcttcctgttttcagagtcgaaccagctcagcaagttcgacctcacttggtaaacgtttgttatcaataagttgttttgctgccgtttgaagccagctattacgttcattcagccacttttcgaagtcattaattccgatagattcttgtgctaattcagacatcctcgcttcctttaccctttgatgtacaagtcgaaaacaatatcttatcttttttgtttgctccggaatgagtgctctgtcaaacggctgcccagcttccagttgtaaagttagaaatgtccgccctgcgacacaacagcctatgtcaaaatgagtacaagacacatttgaacctactacttgtcttttaaacctgtggtgattcaagcacttttttgggaaacggtagttttccagaattagagaaacagtttcggctggaatgctgtaaagttcatcagtatgattgtgtataccatcgccagttaagaaatgctgagaggataatatggatgttactgaagacgccttactacgttctggctttactcaatctgatttacagaagataaaaaacaacattgaaagctatggcggcacgttgggagaggcgattcaggatctagctaatcgattcaggatagttctttggatcttttgcgctttcaccgcaatgtttctctgggtaattatttcaaatgaaatagaatacatcatatcaaccgggatcggtttattcatagcaatgctgattgctgtttttgttcaaccgccagtcctttcttacaaatcctggcggttctggagaaaatacaggggctaatgattcggtgtttcggtggaaagcaggtcaaaaataactttagccttgataccgtagcctactattttcatagttaacttggggcggctcattgtgttgactttacggtagtaatcgtggggaagccaacggaacaatcgccaggcacctgcttttcgcgctaatccaacaatgctgtagatgtttgcgcttagtgttagagtgttataaaaagccagaccagattcagccttaaaccccataaactgagcaatattaatcactttgtcagcgaccacaccttcagagttagattgtccttcagataaaaatttattcacttctttagttataccgttagcgccatctgcaactaagattgcaccagcaaggactccaatagggtcatcgtcgagatcatgatcattccgccgtagaaaaccatccctgaaagcaccacattcacagccgaaatcacatacccgattatcttgttattttccctgacaaactcgacctttgcataaagttgtgcggctctggttcttaacaggcgttcttgttcttgcagattgtctgtttcggcacgcagatttttaatgcatgcaatgcattcttcatcggttttggcccgtcgtgcagtttcaaattctttctctacgacctgccttatctcttcgacaaacttgatacgtgtaagaccatcttgcaaatagaatgctgacagccgatttgcagtttcgacgagtttccgggcctccagatttaccatggtatctgaccatgttctgttccatcccctattaagcagcgcgatatccataaagcctcctttcccaaatgtgtctggtcattttacgtgcaatacgctcacgggcaacaggaaatgctttcccggagtctgatttagcggaacgaacacatgggcaaactctgagacccaaactgtacttccttatttgtcatcgtcggatgtgtcaaagctcttgctgtacggacagtgtttcgacttggtgacgtaggtaaaggtgtaaatgctgttgctgtatatgcacagggttttcccgctcgccgtggttgactgctccgggttgctcatagttatgcgtccggcgctggcgttaaatgacgacaacaaaccgcagagtatcagtacataacctttcattttcttgtccttttctggagtgaagttcgctacgtcttaccacttcgccgttgggtgcatggcgggttgtgtatgtggattattgatctataaaaacgatcgataatataatttcaatcgataaaatctattattaattttaacggtcaagtttgcatacaggaagaagcatgaaaaaaattattgggttgtctctggtgttctgcgctttctcatccgtagctagtggagcggtctcgggcgaaatacagccatatcctgattacctgtctgcctatgtcaaaacgcttgttactgccgggtgtgaacaggcgctgaaaggcagttctgaggatgcactgataaattcccggcgacttgcccaccccccgcgctgccgcaaagagtccagaagccccctccccaaattgaacacagaagaaaaatatcggcggtacgtgggccgcacggtcaagcccggactttctgaggcataaagcccgttctggaaatacagaaatatcaggaagggttagtacgtactttaactataatgaacaagtcaaaattttttataccattgattcataataattattttgagggtgacattccgtaaagtgcttaccgtgaatacctctctgttgaagctctcatctcttgctttctgcgtaggtcatcatacggatcttaagtaacgttatcccatagccgtcagtgattcggaatgtgtatttttcatcacagtatttgtttaattgcttgaaataataatcaataagtgggtcataacgctctgaatgtaagagtgagaatagtttcggtagttcgtagcttagagcacgaccaggcagggaagaaacaataactccgttgccgcactcaagatcgactagtttcatgttctggagatttcgtcgtatttcaacaattagtggtagtaacttatctttgaacgccaattcatcagatttgagcttttcttcagtgagagtcactgaaaaaatggtgattaactcactgatagtatagtgataatactcgttattgaaccgaaccttggacgcctccaataagagatccagctcttcctgaatgctatgtgattctggtatttgtattttggctaactcattacagcgtttgtcataaagaaaatccagaccatgttttatgtccccaagatgttcaaagcgctctttggcgtaggcgaggagttcagcaatatttataccgaaactcacatcttccttgcccacaatgttgctcgaaagattaacggtaaagtcaaaaccttcgaaagaattctcatgcggccaactcgcgaacagcttttcctctttgccgttgcgaagttttgttggatgagctccgaacactgatctgatttcgccaaagtagaggtcatcatccttacctgataagtaagcaactttctttttgaaaacagtattctttcccttaaagggccatccttcaagtttctcacttatcacaatgcggtgaagttgctcaatggattcagtgataatgtcgattgaagatatgagggagtaaacttgcatcgctctgatgtcgatatcatcagataactcagggtaattttttatgtatcggatagctacggttatccagtccatgcaactgcataatgcaccccatctgtttttacccttctgatcagagaagtgtgtataaacgtaatcaaggttgtggtttaccgcctccctaagctcatcgatgagatactcatttatctctacgccatagtcctcaagcatcgtgtgcataacattccccctagcgaacttgtttaaaacataaagtaattcattcaattccatttttaaattttttcctttgctgtcgtatatgggagggcattttcaatgcccaaaatgaaaacagctcagactcgataagtggaataaatgattattagggcgaaatttcatgtttatcaatttgatagtaatgctttgacctttgcgaccatgccaacggaacaatcacacagtttcgcgatctccgcatatgtgttcccgcctttggtgaggtacgactcaaccttgcgtcgcagatctgtatccgctggtctgcctttgtacttattttcagcctttgctttagcaatgccctgtgcctgacgttggcggcgtttggtgtagtcctcgtgtgcgtaatgggctgcaatatccatcatgaggccgttgataagttcaatgatgcggtcacctgctgcggattttaatgcatcgtgcgatgtaggcagatccacaacaacgactcgtaaaccttgttttttaatacgatccttgagggcttcatattgtgctgcggggagtcgggttaagcggtctatggactccaccagcaaaaagtcgccttttttggctgcggcaatcaaacgggtaagttcggggcgctccaacttggccccagaaaagttttcgacataatactcaacacttgttagccgatgctcttcaacaaagtcattgatggtttcaagtgcgcgtgtagcgtcttgatcgtcagtggatgccctgaggtaaacgtgggtcgtgatttggtgtgtagtcattgtttttttcacattgggttttcactctataactttacgtgaattatctacatagagtcaatttttactactcattgtgaatgactttgttcacgaaagctgttttcatttcaggtataccctttgtgaaaatagcgatatgaccttatcaccgaggcgaagcgattattcagaagagcattttcccagctttcagccggatttaatctgagaaactccagccgatgttgctgcatcagatcgctgtgtctagctggttggtttagttcagcagtgagaatgcctgcttgaatttttatgtgcgtctgagcgctggtggtgagaggtgaccatgttaagcaaacttgccactagcatagtaatagctcattcgcggttgtcgcgtcctcacgagtcaggcgatccaagttttcaacatacaaccaactatctttgggaataacacccttctctacctgagtaatgaacacgccaagcttaccttgagtagtgttttgccctttgaatgctgatatgcctgcatccttgatttcgacgtactcgagatcatgttctagcgcaaagctctttgctctcgatgtttgccgctcaaatgatgttcctgaagattgtttctcgcttgaccagcgcacatagctgtataatttttgcttagatgacattaaaatcccgcgccattgatccaatgtgagtaaatctgcatgtcccatactaaaacacctgcttatcaaccaaaagtaggatttatatctttaggctgcccgaaaaacctggtagactcagaacgtatcctcaccgaactgcgtaccgaagggtatgatgtggttcccagctacgacaacgccgatatggttatcgtcaacacctgcggctttatcgatagcgccgtgcaggagtcgcttgaagcgatcggcgaagccttaaaagaaaacggcaaagtgatcgttaccggctgcctcggcgcgaaagaagatcaaatccgcgaagtgcatccgaaggtgctggaaattaccgggccgcatagctacgagcaggtgctggaacacgtccaccactatgcgccaaaaccgaagcacaacccgttcctcagcctggtgccggaacagggcgtcaagctgacgccgcgtcactacgcgtacttaaaaatttctgaaggctgcaaccatcgctgcaccttctgtatcatcccgtcaatgcgcggcgatctggtgagccgcccgattggcgaagtactggcggaagccaaacgcctggccgatgccggggtgaaagagctgctggtgatttcgcaggacacctccgcctatggcgttgacgtcaagcaccgcaccggtttccacaacggtatgccggtgaaaaccagcatggtcagcctgtgtgaagagctggcgaagctcggcatttgggtgcgtctgcactacgtctacccgtatccgcacgttgacgatgtgatcccgctgatggcggaaggcaagatcctgccgtatctcgatattccgctgcaacacgccagcccgcgcattctgaaactgatgaagcgcccgggttccgcagaccgtcagctggcgcgtattaaacagtggcgcgagatctgcccggatctgaccctgcgttccacctttatcgtcggtttcccgggcgaaacggaagaagatttccagatgctgctcgatttcctgaaagaagcgcgtctggaccgcgttggctgcttcaagtacagcccggttgagggcgccaccgccaacgaactggcggatcaggtcccggaagaggtgaaagaagagcgctggaaccgctttatgcagctgcaacagcagatttccgccgagcgtctgcaggagaaagtgggccgcgaaattatggtactggtcgatgaagtcgatgaagaaggcgcgattggccgcagcatggccgatgccccggaaatcgacggcgcggtctatctgaacggtgaaaccaacgttaaaccgggcgacgtgctgcgggtgaaagttgaacacgccgacgaatatgacctgtggggttcccgggtctaatccagcttcccggatagcggcttacgccttatccgggctaccaaaccgctcaaatctgtagccctgccaggcgtagcgcaggcagggctaacctaccaactttgctaccgccgcgcttgtctcctacccctttatcttcggatccagcgcatcgcgcaggccgtcgcccaacagattaaacgccagcaccgtcaggaaaatggcgatcgccgggaataacgccacatgcggcgccatcaccatatccgcgcgcgcttcattcagcatcgcccccactctggcgtcggtggctgggcgccaaggccgaggaacgacaggctggcggcggagataatcgacacgccgatgcgcatggtaaaatagaccactatcgacgacaccgtaccgggcaaaatatggttgaacagaatagtcgtatcgctggcgccaatactgcgcgccgactcaataaacgtctgctgcttcagcactaacgtattacctcgcaccaggcgggcgaacgccgggattgagaatatcgccaccgcgataatcacgttggccatcccgctgcccatcaccgccactaccgcaatcgccagcaaaatgccgggaaaagcaaatagcacatcgcagatgcgcatggtgatgcggtcccaccagccttcgtagtacccggccagcaggccgagcacggtaccaattagcgcgccaatcagtaccgccagtaccccagcggccagcgaaatctgcgcgccgaccagcacccggctgaagatatcgcgccccagcgaatcaacgccgaaccagtgcaccattgacggcccttcattgagccggtcgtaatcaaaatagttttccgcgtcatacggcgctatccacggcgcgataatcgcgacgatgatcagcagcagcacaaatatgcccgccgccatcgccaccggctggcgacgaaaacgccgccagaactcgtgccacggcgtgcggatctgtccgggcttaacgcccggcatggcgttgataaccgcttcccttctccagttgagcaatcgcaccttacttgtacctgatggccgggttaatggcggcatacagcacgtccaccactaagttaataagaatgaactccagcgaaaacagcagcacttccgcctggatcaccgggtagtcgcgcatctccacggaatcgaccagcagccggccaagccccggccagttgaagactttctccaccacaatggagccgccgagcagaaaaccgaactgcagacccatcatcgtcactaccgggatcatcgcgttgcgcaggccatgcttcaacaccaccagcgtttcgctcacccctttagcccgcgcggtacgcatgtaatcctcatgcagcacgtcgacgaacgacgcgcgggtgaagcgcgccatcaccgatgccaccgcggcgccaagggtcaacgacggcagaatatagtgccgccagctgtcggcgccgaccgtcggcagccagcctagctcgacggaaaaaacctgcatcagcagcatgccgagggcgaacgccgggaaggagataccggttaccgccagcgccatccccagccgatccggccagcgattgcgccacactgccgcggcgatgcccgccgccatgccgaacagtaccgcccagctcatgctggcaagcgtcagccacagagtcggcataaagcggctggcaatttcgctggtcaccgggcggcgcgaagccattgagatgccgaaatccccctgcagtacgttggtgatatagtgccaaaactgcacatgcagcggctgatcgagccccagttgttggcgtaccatcgccaccacctgcgcatcggcttccggcccggcaatcaaccgcgccggatcgcccggcagcatatgtacaaacaggaacaccagcacggcgacgataaagagcgtcggaatgagccccagcaggcgcttcagaacgtaattcagcatcgccccctcccatttcggcagagggaacgcgtgagcataagcattatcactgcgtcagatccgcctgctcgaagctaaaaccggtatccggctgaatataaaacccggtcaggtttttgctatgcgccgataccagcttttccaccaccagcggcacccacggcgactctttccagataatgtcctgcgcatctttatagagtgtggtcttctgttgcgcatcggtcgttttcagcgcctcgctcaggtctttatcgacctgcgggttgctgtaaaacgcggtgttaaacagggtcggcggccagttttgtgaggcgaatagcggcgacagcgcccagtcggcttcgccagtcgacgctgaccagccggtgtagaacatccgcaccccgctctctttctgccccttgccttcaacctgcgccgcacgctgtccggcatccatcgccgtcacctgcgctttaatacccacctgcgccagctgctgctgggtaaactgcagcaccttctgcgcggtgctgtgattatgcgatgaccacaacgtagtgctgaagccgttagggaaaccggcttctttcagcaactgacgggctttcgccgggtcgtaaggccatgcgctgtaggtctgggcgtaagctatagaaggcggcaccaccccggtcgccggggtggcatatccggcaaacgcgaccttgaccagcgcctgacggttaatcgcatagttgatggcttcccgcaccttcggattatcgaacggcttctgcgtcacattcatgctgatatagcgctgcataatcgacgggctggccaccagttccagtttgctgtttttcgccagcagcggcgcctgctcgtaagggatcgggaaggcgaactgcgcctcgccggtctgcagcatcgccgcacgggtgttgttatcgaccaccgggcgccaggtaatggaatccagcttcggcagccccggctgccagtaaccatcaaacttgctgactttgacgaaatcggtctgattccaggtgtcgagcttatacggcccggtacctaccgggtggaagccgatctctttgccatattttttcagcgccgccggagaaatcatcgccgtcgccggatgggcaagaatattgataaacgccgagaacggctgtttgagcgtgattttgaccgtcgtcggatccaccgcctcggtgctggcgatattcttatacaggttatagcgtttgagatggttatccggattgctggcgcggtcgagattcgctttcaccgcttcggcgttaaaatcggtgccatcctggaatttcaccccgctgtgcagcttgatggtatacaccagaccatccgccgaaacggtgtaactttccgccaatacgttttgcagtttcatctctttatcaaggccgaacaggccttgataaaacgacttcgccaccgcctgcgataacgtatcgttcgcgtcatagggatcaagggtcgtgaagttggaaccgaccgccactaccacatctttcgcggcgaaggccggcgccgccgtcagcgccgaggcaatcccaagcgccagtagccatttgcgtgtaacaggttgagtcatgttgttatgctcctgcaagagtgcgttatgttgttatcggctcagtacatcggcgggctcgcgggcgacataatgccccggcgctaccagctgtaacggcgcgctgtcgatttcttctcccggtttatagatattccccggcagctcgtcagagagtaatacgcgctgcggttgacgatgcgccggatcggcgaccggcaccgccgccatcagtttacgggtgtaaggatgctgcgggttctcaaacacggcgcgacgcgggccaatctccacgatccgcccgcgatacatcaccgctacgcggtggctgatgcgctccaccaccgccatgtcatgggaaataaacagaaatgcgatgcccatttcacgctgtaaatcgagcagcagattaataatctgcgcgcgaatcgacacgtccagcgccgataccgactcatcggcgatcaccactttcggattgagcgccagcgcgcgggcgatacagatacgctgccgctgaccgccggaaaactcatgcggataacgccacgcgtgttccgcctccaacccaacgcgctgcaacagccaggcgacgcgttcgcgagccgcatccccttccagcagaccatgcacgcgcagcggctccataatggaataaccgaccgtctgccgcggatcgagcgaagcgtaaggatcctgaaaaataaactgaatgtcgcggcgcagcgtctgtagcttgccgccggacagcgcatcaatacgctggccgttaaaagtgatgctgccgccctgcgcttccaccagccgcagcagcgcccgtccggtggtcgatttaccgcagccggattcgccgaccagcgacagcgtttcgcccggccacagatcgaaactcactttttccaccgcgtgcacttcgcgggtaacgcggttgagaataccgccgcggatcggaaaacgcgcgaccaaatcgcgcacctgcaaaatcggtttaccggccaccacggtattctgttccggctgctgggtcacaccgtcgttgagcagcgcgaagcgtcgcggcaaatcgctgccgcgcatcgagccgagcttcggcaccgccgccagtagcgcccgggtataaggatgctgcggggcgcgaaaaatatcctcgacgcgcccgctttctaccgcttcgccgcggtacatcaccagcacgcgatcggcgatttccgccaccacacccatatcgtgagtgataaacatcacccccatcgccatctctttttgcagcgcggcgataagctgcaggatctgcgcctgaatcgtaacgtccagcgcggtggttggttcatcggcaatcagtaccgccggtcgacacgataacgccatggcgatcatcacccgctggcgcatgccgccggaaagctgatgcgggtaacgtgaaagcatcgcttccgcttccggaatacgcacccgttcgagcatctttttagcttcccgcagcgcctcgtcatgccgcagtccctgatgtagccgaatagactcggcaatctgctcgccgatggtgaataccgggttcagcgaggtcatcggctcctgaaaaatcatcgccacgtccgcgccgcgaacctgacgcatttgacccgccgtttgagcgttaatatcaataacctgacggttacgtcggcgcagcagcaacgcctcgctgctgacctcgctgaccgcctcgtcgagcagacgcatcagcgccagggcagtcaccgattttccggaaccggactcgccgacaatcgccagtgtctcgccgcggcggaggctaaatgacaggttacgcaccgcagaaacgcgctgccgctgctggctaaaggcgacgttaagatcgcgtaccaccagcacatcgtcttcatcaatttcatgactttgcggcaagctcgcttctccttttattcgcgataaattccaatcgtcggcgtatcgcccgcataacaccatgcccggtacataccttcgctattgaaaggcagcaccacattccctcgcggtcgatggcgataaggcccccgctgccgcccagcgccggcagtttttcctgcaccactcgctcgcaggcctcaaacaggctgagattgccatactccatcagcgccgaaatgtcgtaagcggcgagcgtgcgcatgaagacttcgccggtaccggtgcaggagaccgcgacgctggcattattggcatagcagcccgcgcccggcactgggctgtcgccgacgcgtccgggcagtttattggtcattccgccggtggaggtcgctgccgccagattaccggccaggtccagcgccaccgcgccgacggtacccattttgtggcgttcatcgagcggtgcggcatggtggtcgagaataatctcgccgccctctttcgcctgctgcaactgcaaaagccgctcggtagtggaaaataactcgttttcaaccagcgccatgccgcgcgaggcggcaaacttttccgccccttcgccgataagcagcacgtgcggactttcttccagcaccagacgcgccgccagcaccgggttacgcagatgctttacgccagccaccgcgccggcctgcaggctatagccatccatcacgcaggcatccagttcgtgagtttgatcgtgggtaaacacggaacctattccggcgttaaatagcgggcactcttccagcaggcgtaccgattcggtcaccgcatccagcgcgctggcgcctgctgccaacattttttgtccgctatcgacgatggccgacagcgcggccacatactcgcgttcgcgcgcctgagtcatctgcgcgcggctaatcgcgccggcgccgccgtggattgctattaccgccttacccattcgatctttcctttgccataaactgtatagatatcattatactgactaaccttttatacgttttttgaatatagaaagagcatccggtgatgtaaagcctcgtaccgcagtggcatacagtcgccggcgcttttctgccataataggcgttttcgacgttttgccagcaggagtaccccatggattttaccgccggactgatgccgttcgacacagccctgactcagatgctcgaccgtatttcgccgctgcaggccacggaaaccctgccgctgctgcaggccttttcgcgcgtgaccgcccatgatgtcgtttcaccgctggacgtacccggttttgataactcggcgatggacggctacgccgtgcgcctggccgatctcgccgacggcgcgtcgctgccggttgccggtaaggcctttgccggccaaccgttccatgacgcctggccggcgggcacctgtatccgcatcatgaccggcgcgccggtgccggaaggctgcgacgccgtggtgatgcaggaagaaacggaacaaaccgatgcgggcgtgcgcttcaccgccccggtaaaagccgggcaaaatattcgccgtcgcggcgaagatatcgccaacggcgcggtagtattcccggcgggcactcgtctcaccgtggccgagctgccggtgctggcgtcgctgggtattgccgacgtcgaggtagtccgtaaagtgcgcgtcgcggttttctcgaccggcgatgaactccagttgccgggccaaccgctcggcgacggccagatttatgacactaaccgcctggcggtacatctgatgctcgaacagctgggctgcgaggtgatcaacctcggcattattcctgacgatccggcgaagctgcgcgacgcctttatcgccgccgaccagcaggctgatgtggtaataagctcaggcggcgtctccgtgggcgaagccgattacaccaaaactatcctcgaagaactgggcgagatcggcttctggaagctggcgattaagccgggtaaaccgttcgccttcggcaagctcagcaacagctggttctgcggcctgccgggcaacccggtttccgccaccttaaccttctatcaactggtgcagccgctgctggcgaagctctccggcaaccgcggccaaacccagccgatgcgcctgcgcgtgcgcgccgccagtcgactgaaaaaatcgccgggccgcctcgacttccagcgcggcgtgctgcaacgcaatccggaaggcgaactggtggtaagtaccaccggccatcaggggtcgcacattttcagctcattcagcctcggtaactgctttatcgtgctggagcgcgaacgcggcaacgtcgaagcgggagaatgggtcgaagtcgagccctttaatcatctgtttgggggctgtaatggccgttgagctgagcgacgaggagatgctgcgctataaccggcagatcgtactgcgagggtttgatttcgacggtcaggagcggttaaaagccgctcgcgtactggtcgtcggcctcggcgggctcggctgcgccgccgctcaatacctggcggcagccggggtgggtcagctcaccctgctggatttcgataccgtttcattatccaatctacaacgccagacgctgcacagcgacgcaaccatcggccagcccaaggtcgattctgcccgcaatgcgctggcgcgcattaacccgcacgtccggctggtcaccatcgatgcaatgctggatgacgcggcgctggcaacgcagattgccgaccaccatctggtgctggactgtaccgacaacgttgctattcgcaaccagctcaatgctggctgcttccaacacaaaaccccgctggtctccggcgcggcgattcgtatggaagggcaaatcagcgtctttacctatcaggacggcgagccctgctatcgctgcctgagccgcctgttcggcgaaaacgctctcacctgcgtcgaagccggggtgatggcgccgctggtcggcactatcggttcgctgcaggccatggaggcgattaaactgctgaccggttacggcacccccgccaggggcaaaatcgtgatgtatgacgcgatgacctgccagtttcgcgaaatgaaactgatgcgccacccgcagtgcgaggtgtgcggttcgcgctaatttcccgccgccggcgagccaggtcgccggtcgttttgtgaaccgtaccattctttttctctacgacgaatttacccacaccgcttgttgatttgcatcaatataactttcattcgaaagttatttaatcttcatatgcaaataagagggtaaatcatgatcttcaacatccagcgctactccacccatgacggcccggggatccgtaccgtcgtattccttaaaggctgttcgctgggctgccgttggtgtcagaacccggaaagccgcgcccgcagcgaagacctgctgtatgacgcgcggctgtgtcttgacggctgcgcgctttgccagcaggtggcgccggaggtgattacccgtactctggatggcctgatcatccatcggcaaaacgtcaacgacagccacattgccgcgctacgccactgctgccctactaccgcgctgacggtctgcggcgaggaaaaaagcgtggcggaaattatgacgacggtgctgcgcgataagccgttttacgatcgcagcggcggcggcattaccctttccggcggcgagccctttatgaacccggcgctggcgcaggcgctgtttgaggccagtcatcaggcgggcattcacaccgccgtggaaacctgcctgcacgtaccgtggaagtacattgaaccctctttaccgtttgtcgatctgtttctggccgacctgaagcacgtcgacgaggccgtcttccagcagtggaccgacggcagcgcccgccgggttctggataacctgcagcgcctggcgcaggcagggaaaaaaatcattatccgcgtcccgttaattcaggggtttaacgccagcgaagccgatattaccgcgattaccgattttgccgctgaccgcctgcaggtcagcgaaatccatttcctgccgtatcacacgctgggaatgaataaataccaactactcagtcagccctataccgcaccggacaaaccgctggccgctcccgagctgctggcctttgcacagcagtacgcgcaaagcaaaggtttaacggcgaccctacgaggataacttatgaccaccttaaaactggatactctgagcgcccgcattcaggcgcataaaatggcgctggtgcatatcgttaagccgccggtttgtaccgagcgcgcccaacactataccgccgcctatcagcaacatctcgataaacccatcccggtgcgtcgcgcgctggcgctggcgcatcacctggcggaacgcactatctggatcaagcacgatgaactgatcgtcggcaaccaggccagcgaagttcgcgccgcgccgattttcccggaatataccgtcagctggattgagaaagagatcgacgatctcgccgaccgtccgggcgccggcttctcggtcagcgaagcgaacaaacgcgtattacatgaagtgtgcccatggtggcgcgggcagaccgttcaggaccgctgctacggcatgtttaccgatgaacaaaaagcgctgctcgccaccggtattatcaaagccgaaggtaacatgacttctggcgacgcccacctggcggtcaactatccgctgctgctggaaaaagggctcgacggaatgcgcgcgaaggtcgctgagcgccgctcgcgcattaatctgacggtgctggaagatctgcacggcgagcagttcctgaaggcgatcgatatcgtgctcgcggcagtgagcgaacattgcaaacgcttcgctacgctggcgcgcgacatggcggcgcaggagtcgcgcgaactgcgccgcgacgagctgctggcgatcgccgaaaactgtgaaattatcgcccacgagccgccgaaaaccttctggcaggcgctgcagctctgctacttcattcagttgatcctgcagattgaatccaacggtcactcggtctcctttggccgcatggaccagtacctctatccatactaccgccgcgacgttgaactgcagcaatcgttggatcgcgaacaggccattgagctgctgcattgctgctggttgaagctgctggaggtcaacaaaattcgctccggttcgcattccaaagcttctgccggcagcccgctataccagaacgtcaccatcggcgggcaaaatctggtcgatggccaaccccaggacgccgtcaacccgctgtcgtacgcgatcctcgaatcctgcggccgcctgcgctcgacccagccgaacctcagcgtgcgttaccacgccgggatgagcaacgacttcctcgacgcctgcgtacaggtgatccgctgcggtttcggcatgccggcgtttaataacgacgaaatcgtcattccggaatttatcaagctagggattgagccgcaggacgcctacgattacgccgctatcggctgtatcgaaaccgcggtcggcggcaaatggggctatcgctgtaccggcatgagctttattaacttcgcgcgggtgatgctggcgacactggaaggcggccgcgatgccaccagcggccaggtgtttcttgcccagcaacatgcgctgtcgaaaggcaacttcgctaacttcgaccaggtgctggaagactgggacacccagatccgctactacacccgtaaatccatcgagattgagtacgttgtcgataccatgctggaggagaacgtccacgatattctctgctcggcgctggtcgatgactgcatcgaacgggcgaagagtatcaagcaaggcggcgcgaaatatgactgggtttccggtctgcaggtcgggattgccaacctcggcaacagcctcgcggcggtgaaaaaactggtcttcgatcagggggttatcggtcagcaggagctggcgaaagcgctggcggaagattttgccggcctgacccacgagcaactacgtcagcgcttgatcaacggcgcgccgaagtacggcaacgatgacgatagcgtcgacattctgctggcccgcgcctatcagacctatatcgacgagctgaagcagtaccataacccgcgttacggccgcggcccgattggcggtaactattacgccggtacgtcgtctatttccgctaacgtcccgttcggcgcgcagactatggcgacgccggatggccgcaaagcgcactcgccgctggcggaaggggccagcccggcctccggaaccgatcacctggggccaacggcggttatcagttcagtaggcaaactgccaaccggcgcgatcctcggcggcgtgctgcttaaccagaagctgaatccttccacgctggagaacgagtccgataagcagaagctaatggtgctgctgcgcaccttctttgaggtgcataaaggctggcatatccagtacaacatcgtgtcacgcgaaacgctgctggaagccaagaaacatcctgaccagtaccgcgatttagtggtccgcgtcgccggatactcggcgttcttcaccgccctgtcgccggatacccaggacgatatcatcgcccgcaccgagcatactctgtaaggaaaatacccggccggcgctgcactgagccgggtgacatcttctgtacccattgatgatcggataaactttcattcgaaataaatttgtgctgcccatcacattgtaattagaatgttactggtcgaagttaagccaggagcacctcttatgaccgttaaagttatcgtcaccgatatggacggaacttttctcaatgacgccaagcagtacgaccgcccgcgtttcctcgcacagtttgcgcagctcaaacagcaaggtattgaatttgttgttgccagcggcaaccagtactatcagctgatctcatttttcccggaaatccgcgagcagatttcgttcgtcgcagaaaacggcgctctggtttacgagcatggcaaccagttattccacggtgaactgacccgtcatgagtcgcaggtggtgatcggcgaactactgaaagatccgcaactcaacttcgtcgcctgcggcctgcagagcgcatacgtgagcgataaagccccggacgactttgttgagctgatgtcgaagcactaccatcgtctgcagcgggtgagcgattaccagcacatcgacgatacgctgttcaaattctccctcaacctgccggatagcgatatcccacagctcatcgataaactgcacgtctcgctggacgggataatgaagccggtcaccagcggctttggctttgtcgatttgattatccccggcctgcataaagccaacggcatcagccgcctgctcaaacgctggaacatttcgccgcagcagtgcgtagcaattggcgacagcggcaatgacgccgaaatgttaaaactggtgaaatatgcttttgctatggccaacgccgccgacagcatcaaagccatcgccggtttcactaccgatgacaataaccacgacggcgcgttgaaggtgattcaggccgttctcgataagactccccctttcaacgattgatcctgtgccggggcatcccgccccggcttttccattttgtgcgccgctgcatgattttaaacttgcattaaccttaatttaacttaaattaacgtttgtaagatttataactttcgaatgaaagatacagcgaggtgattatggctgctctcccgacccacgaaacattacctgccgaccacaaagcggcgattcgccagatgaaacaggcgctacgggcgcaaatcggcgatgtccaggcggtattcgataaactctcggcgcgcatcagcgagcgcctggacgagattaacgccctgaaagccgcgggccaggaggtctggccaacgatcccgtttagcgatatcgcccagggtaaagtgagcgatgcgcagcgcgaggcgattaagcgccgcggttgcgcggttatcaaaggccactacccgcgcgaacaggcgctggcctgggataacgcgatgctggaatacctggacctgaaccatttcgacgacgtttacaaagggcccggcgacagcttcttcggctcgctggaggcttcgcgcccggagatctatccgatctactggtcgccctcgcaaatgcaggcgcgccagagcgatgaaatggcggcggtacaatccttccttaaccgtctgtggcgctttgaacaggacggcaaacgctggttcgatccggatgtcagcgtgatttaccctgaccgcatccgccgccgcccgccaggaaccacgtcaaaggggttgggcgcgcataccgattccggtgcgctggagcgctggttgcttcccgcttatcagcaggttttcgccaacgtctttaatggcaatatcgacgcctacgatccgtgggacgcggcgcaccgtaccgaagtggaagagtacaccgtcgataacaccaccaaatgttcggtcttccgcaccttccagggctggacggcgctgtcggacatgatccccggtcaagggctgctgcatgtggtgccgatcccggaggcgatggcttacgttctgcttcgcccgctgctggatgatgtgccggaagatgaactgtgcggcgtcgcgccgggcaaggtactgccgatctctgagcaatggcatcctctgctcatcaaagcgttaagctcgattcccgcgctgaatgccggcgattccgtctggtggcactgtgatgtcattcactcggtcgcgccggtggaaaatcaacagggctggggcaacgttatgtacatcccggccgcgccgatgtgcgagaaaaacctcgcctatgcgcagaaggtaaaaatcgcgctggaaaaaggcgcctcgccgggggattttccgcgtgaagattacgaatgtgagtggcaggcgcgcttcaccgttgccgatcttaacgatcacggcaaacgcgcattgggcataaagatctaatcatcatacagaccttgctgttctacggcggtatggctcttgcctggccggatccgccgcaccgaatcgcgtactaccagggcgccgtgcagcagcagcgagccatgcggcgcttccgggcgcagcagacgctgctggagaagatgcaccgcctcgctgccgagctcatccctcggcacatgtatcgccgttaacggcacgtcctgaatcgccgccagattaaaaccgtcgatactcatcaccgagacatcctgcggcacccgcaggcctcgtttttgcagcgcgctgacggtacctgcggccataaaatcgccgcccaccagaaacgccgtcggcatcgggcgcccctgtaaagcgtcgagccaggccccaacctgctcttccgtttctctggcgctaaagttggcgacgctaatcaagtcgcggctaccggtaaaccgcaggttgcgcgcgcgccacgcctcttttatgcccaccaaccttagctccatggtatagcggcgcaggcacatcacgttcattaccgcctgatggcccatatcaaatagatagcgagcggcgcactggccaatcagccggtggtcaggcgcaatggaaggaagccgcatcccttcatcccggcagttaattaatacgcaaggtttgccaagatccgccgccagcgcgtggatatgccgatcgtcgatacccagcaataccgccgcctgggtgtcggtctcgttcatgcgggccagaaacagattggcgtcgctgtcgttttcttccagcgcgcaatagcgcagacgcacttcatgcggcgccagcgcgttattgatactctggatgacgcggtagtagaaaatatctgaacgttcgtcaaaggcccgctgcggcgcaaaaatcagcaggttattcagcagtagccgcccggcggccaatccctgcataaccccaagctcacgggcgcaggtcaataccgcctgacgggccttttcgctggtattcgcttttccggctaacacacgcgaaaccgtactggcagacagcccggtgcgggcggcaatttcagcgactcgcagctttttatccattctgtgatccagctccaattcaaaaatgaaagaattttcatagtcgccaaaccctgaccaacaagcaaatactccggcaatttatgagaactacgtcatctcatgaaaaattttgcataaatagcgctactgcctgccgactttctcccttattttgaattggtccaatatcttccatactagttataccaaaagatattgaaataaaaacaaataattcaaatagttagaactattacgtgacaacccagcatctggagcgtcatttccccctacaacgtcttgtggagagttctatgagtcaaggcctcaacaatgatatggcagtcagcaaaacgcgccgggtggtaaaaaacctgcgctggtgggtgcttgtactgttcttgcttggcgtcaccgtcaactacatcacacgcaactcgctggggattattgccccggaattgaaagccactctcggtattaccaccgagcaatattcgtggattgtcggcgcatttcagctggcttataccatcttccaaccgctgtgcggctggcttatcgacgtcatcgggctcaagctgggctttatggtttgcgccacgctgtgggcggtggcctgtatcgcgcacgccggtgccggcagctggctgcatctggctattttacgcttctttatgggcggtgcggaggcggccgctaccccggctaacgccaaaaccatcggtgagtggttcccgaaatccgaacggccgatcgccgccggctgggctggcgtcggcttttctatcggcgcgatgctggcgccacctatcatctacttcgcccacgcctccttcggctggcagggcgcatttatgtttaccggcgtgctagcgctgctgtgggtagtactgtggtgggcgttctaccagagcccggaaaaacacccgaatctcagcaaaagcgagctggagtacatcaagcaggacaacgaagcgccgccggtgaagctgcccttttttaccgcgctaaaaaccgtctcgaaaaacaaacgtttctacggtatcgccatccccgcttttatggccgagcccgcctgggcggtgctgagcttctgggtgccgctgtacctggcgaaagagcacggtatggatcttaaacagatagcgatgttcgcctggctgccgtttctcgccgccgaccttggcagcgtggtcagcggttatctcacccgcctgtacgtccgttggttcggctgtacgcgagtcaattcggtcatcgccagttccgttaccggcgcgtttctgatgatctcgctggccctggtggccattacccgcgatccctatatcaccatcatcctgatctccattggcggtttcggccatcagatcatctcctgcatgctcagcgcgctggtggtggagtctttcgacaaaggacaaatggcgacggtcaacggtatgcgcggctccgcggcgtggatcgccagcttcctgttctcattattaatcggggtgaccgccgacaaaattggcttcaacccgctgtttatcgccatgggtttctttgacctgattggcgccgttttcctggtggcatttattgctgaacgtcgcgccaagcgcgcctgagagtggatgtaaaatatgaagacgttgaaacactggactttgcaccaacagctggagcatcacgttgaactgaccgttgatggtcagcacactttgtgtctgtacgtgctggaagagaatttattccgcgtcctgctgaagcgccagggccaactggcgctggatcgcacctggagtatcgccccgcagcaggatgtgccgtgggaaggccgcgcgcgggatgacctcagcggttttagcctcccggcctggcagatgaccaaagaagatgacgcgctgaccatcgccacccgccagctgtgcgttaccgtccatcagccgctttggctggagtggagctatcgcgacgaggccggtgagtggcagacgctcgccaatgaccgcccgaccagcgcctatctggcgaatgcccacgggatggcgtcgcccattatcttagccgccgtaaagatgaacgtttctacgggctgggtgaaaaagccggcgacctgcagcgtaacggcaaacgctacgaaatgcgtaacctcgatgccatgggctacaacgccgtcagcaccgatccattgtataaacatattccctttaccattacgcaacgcagcgatatcagctacggcctgttctatgacaacctgagcagctgctggctggatctgggcaatgaaatcgacaactaccacaccgcctatcgccgctggcaggcggaagccggcgacatcgattattacctgtttaccggtaagcaggtgctggatgtgaccaaagcgtttgtccgtctgaccggtaaaacgctgtttgggccaaaatggagcctcggctatagcggctcgacgatgcactacaccgacgcgccggatgcgcaaaatcagctgatgaattttatccgcctgtgcgagcagcatgcgatcccctgtgattcgttccagctctcttccggctatacctcaatcaacggcaaacgctacgtctttaactggaactacgacaaggtgccgcagccaaaattgatgagtcagtcgttccacaatgccgggctgaaactggctgccaatatcaaaccgtgcctgctgcaggatcacccacgctatggcgaagtggcggaacgcggcctcttcattcgcgattcgcaaaccgatgcgccggagcgttccagcttctgggacgatgaaggttcgcatctcgacttcaccaacccgcacaccgtgacctggtggcaggaaggcgtgaccacccagctactggagatgggtatcgattcgacctggaacgataataacgaatatgaggtatgggacggcgaggcgcgctgctacggctttggccgcgaaatcgccattaagcatattcgtccggtgatgccattattgatgatgcgcgcctcactggaagcccagcagcgctttgcgccgcaaaagcgcccgtatctgatctcccgctccggctgcgccgggatgcagcgctacgtgcaaacctggagcggcgacaaccgcaccaactgggatacgctgcgctataacacccgtatgggattagggatgagtctttccggcttgtttaacgtcggccatgacgtcggcggtttctccggcgataaacccgagccagaactgttcgttcgctgggtacaaaacggcgtgatgcatccgcgctttaccattcactcgtggaatgacgaccagacggtcaatgaaccctggatgtacccggaaatcaccccggcgatccgctctgccatcgagctgcgctaccgtctgctgccctatttgtacaccctgttatggcaggcgcatgccgatgacgaacccatgctgcgcccgaccttcctcgaccaccagcacgatacccagaccttcgccgagtgtgatgacttcatgctggggcgcgatctgctggtggcaagcgtggtcgagcctggcggccgtcagcgccagctgtggctgcccgataatcaggacggctggtacgatttttacaaccaccagtggttcgccggtggtcagtgggtgacgctggacgcaccgctggaaaaactgccgctgctggtccgcgccggcgccggtctgccgctcagtgaacgtatcagccacgtcgatgcgcaaaaagacgatcgtcgcgaactgcagttgttcccactgaaaggtaccggctcaacccgcggtttgctgtttgaagacgacggagaaagctggggctataaagagggtgatgcgctatggctggagtgggaaatgacctgcagcgccagcagcataaacctgaagctcgacgctcgcggcaactatcgcccagcgtggaaagcgctgaagctgtcattaccggcgggagaaaaacgcaaactgctggtgaatggcgtcgaagggaccgagtggaggctctgaccataggctggctgaaaatgccggtattggtggactagaaatccccggtagcgctaccgcttaccggggctacaacactgtgcggtttggtagcccgggtaaggcgtagccgccacccgggtaacggagagggattactcgatacctttactgcgcaggtaatcttcgtagttgccgctgaaatcgattacgcgttctgggtgatctccagtacgcgagtcgccagcgaactcacgaactcacggtcgtgagaaacgaaaatcagggtgccctgatacatctccagcgccatgttcagcgattcgatcgattccatatccaggtggttagtcggttcatccatcaccaggatattcggtttctgcatcatcagcttaccgaacagcatgcgacctttctcgccaccggagaggactttcgccggctttttgatatcgtcctggctaaacaacagacgaccgaggatactgcgtaccgcctgctcgtcatcgccttcctgtttccactggctcatccagtcaaaaaccgtcaggtcgttttcgaaatcttcggcatgatcctgcgcgtagtagccgatacgggcgttttcggaccacttgacggtaccgttatccgcttccagttcgccgaccagggttttcagcatcgttgatttaccgacgccgttggtccccagtaccgccagcttttcgccaacttccagcagcagattaacccctttgaacagcgggccgttatcaaaacctttcgccagcgcttcaacttccagcgcattacggaacagtttcttatcctgttcgaagcgaatgaacgggttctggcggctggaggctttcacctcatccagcttaattttatcaatctgacgggcgcgagaggtcgcctgacgcgattttgaagcgttggcgctaaagcggctaacaaaggcctgcaggtcggcaatttgcgctttcttcttggcgttatcggccagcagacgctcacgcgcctgggtcgccgcggtcatatactcgtcatagttacccgggtacacgcgcagttcgccgtaatcaagatccgccatatgggtgcagaccatgttcaggaagtggcggtcgtgcgaaatgatgatcatggtgctgtcacgttcgttcagcacctgctccagccagcgaatagtatcgatgtcgaggttgttcgtcggttcatcgagcagcaggatatccggattggaaaacagcgcctgcgccagcagtacacgcagtttccagcccggcgcgacttcgctcatcgggccgtaatgttgctccaccggaataccgacgccgagcagcagttcgccggcgcgcgcttcagcggaatagccgtccatctcgccgtatttcacttccaggtcggccactttatagccgtcttcctcgctcatttccggcagcgcgtagatgcgatcgcgctcttgcttcacttcccacagctcgccgtggcccatgataaccgtatccagcacggtgaactcttcgaaggcgaactgatcctggcgcagtttaccgatgcgctcgttcgggtcgagagacacgttgcccagcgtcggctcaagatcgccgccgaggatcttcataaacgtggatttgccgctgccgttggcgccaatcaggccgtagcggttgccgccgccaaatttgacggagatgttttcaaacagcggcttactgccaaactgcatggtgacgttgctggatactagcacgaggatatcctgaaaatagagaattagggatgtgatgaaccagacattatgccagcaaatggttcacttttcacggcttgcggtaaaaagcccgccaataactatgctatggtcagggttttaccgcaaaatgaccgattgctaagacataataattatccgcaattcagagggaatttatgaccacccgcaccagccatcctgcatttatcccgctccagggcggcatcaactttcgcgacctcggcggtcaacgcgcggccgacggccggcgcgtacgttctggcaaactgctgcgctcaggctcgctgcacaacatgacgccggaggatctcaatcatctcagcgccattccgctgagccgggtgctggattatcgcgatccgacagaggtcaaccgcagccctgaccggctgaatagcgaagccttttacctcaacgccccggccaatccactttccagcagcgtcaatgcgaaagtcaccgagtttaacgccgcgaccctcaacgcgatggacggcgagcagtttatgctgcagctctaccgccagttaccgtttgataacgccgcctatcgccagttgacacaatggctgatggagccctttgacggcgccctgctgcagcactgcgccgtcggtaaagaccgcaccggcgtcggctgtgccctgacgctgttcgcgcttggctgcgatagcaatacggtcatggaagagtatctgctgacccaggggatgctggcgcaggtcgaaggattcctgctcgacaccttcggcgaaggccttaatgagctcgggcgcaaaaatctcgccgccatcatgaccgtccaggagtcgtatctggcgaccgcgttgtcgagcattgaacaacgttacggtaatgtcgatcgctggctggaacaagaataccgcctaacgccgcaggcgcgcgaagcgttacagtcgcggctgctggaagattaattcacgtttcgctaaccagacgattcgccgtgaaagcggcgcgttgcgcactacactagtagcaacaggaaaaaattgtgatttcgtacacatctgatttacctgtttatcggaaagcacatataatgcgctcccatctactatctgaatatctaacaaggcccgtgtggcgttgacaccgcgcacgacatgaagaatatgaaattatcgacactattagcggcagccttcgccatcgtgggcttttgcaacacagcttcagctgttacctatcctctgccgaccgacggcagccgtctgattggccagaaccaggtcattactattccagacgataataaacagccgttggaatatttcgctgccaaataccagatgggtctgtccaacatgctggaagcgaacccgggcgtggatacctatctgccgaaaggcggtaccgtgctgaatattccgcaacagctgattctgccggacaccgtgcatgaaggcatcgtcatcaacagcgccgagatgcgtctgtattactacccgaaaggcaccaataccgtgatcgtactaccgatcggtatcggccagttgggcaaagatacgccgatcaactggaccaccaaagttgagcgtaagaaagcgggcccgacctggaccccgacggcgaaaatgcacgccgaatacgccgcggaaggtaacccgctgccggcagtcgtgccagcaggcccggataacccgatgggtctgtacgcgctgtatatcggtcgtctgtacgccatccacggtaccaacgccaactttggtatcggtctgcgcgtgagccacggctgcgtgcgtctgcgtaacgaagacatcaaattcctgtttgaaaacgtgccggtcggcacccgcgtgcagtttatcgatgagccggtaaaagccaccaccgaaccggatggcagccgctacgtcgaagtacacaacccgctgtcgaccaccgaagcgcagttcaaaggcggcgaaatcgtgcctatcagcctgactcaggcggtgcagtcggtgaccagccagcctgacgttgaccaaagcgtaatggatcaggcgatccagaaccgttcagggatgccggtgcgcctgaactaagttcagcaaccacatgaaaacggcgggcctggtgcccgccgtttttttatctgcatccgctaagcactgcgccagcagggagatctcccggttagccgttattgaccagaatgaccccgccatgatcgtagcggtagtggcagtgcgcgtactccagcggcgtaccgtcttccagatagataacctgctcaacctccagcaccgggtcggtcggctcgcagttaagatgtaatttatccagctcatccggcttcatcgcccgcaccacccgataagaccccatcagcttcagccccagcgtctcctgcacgtaacgaaacaccgaactctgcagatgacttttattgagccccggcaccagcgccaccggcattaccgttaagtccagcgaaatcggctcgccgttaagtaaccgcaggcggacaaagtcatataccggcgcatcggcgtcgatcagcagcgaactcagctccttctcactgggaaaacgcagttcaaagcgcactacttcgcttttcacctcgccaagatgctcccaggttttagtggcgccgaaatagtcgctgcctggcagttcccactgcgatagctggaggaaatttttccgcacaaaggtgccctgccctttgcgggtgtagataagccctcgacaatcagctgacgtatcgcctgttgaatcgtcatccggctggtattgaactctgccgccagcgcaaactggtcgggtaacggcgcgctggcaggatactgctggctgatgatccgcttttttatttcccgcgcgatattaagatacttcgccgtcattctccgatcctttaatattttgtaaggggctggcgggcagcatacaccgcccgctcgccgttacatctcttcgccattactgtggataacccgcttcaaccacgcgtagcttttcttcggtacccgcttaagatccttgagatcgtggttttcacgattgacgtacaccacgccgtagcgtttacgcatgtcgccctgcgagctaaggatatcgattaatccccagccgagatagcctatcacctgcgccccgtcttcaaacattgccgctttcatggcgttaatgtggtcacggtggtaggcaatgcgataatcatcggcgacctgattttctccgtcccaggattcgatcaccccaatcccgttttcaatcgggaagaccggcagccgccagtcgttgtaatagcgggtaatgatcgtgcggaatcccagcggatcgatctgccagttccattccgtcgctttcagatacggattgtcctggttgccgaacaacatatagttgttcaccgccgtacccggtggaatcgcgtcgctattgagcgcgcggctggcatagtaactgaatgccagatagtcgaccttcaccgtcgccatcagcgcgatatcttcagggcgatagatatcgtcaaaaccttcacgggcgacaaaatgcatcacttccggactatagccctcgcccgcgtaggcgcgcagcaggttctggtttaaaaactcgtccagttgctgggcgcacagaatatcgcgcggtttacaggttgccgggtagaccagcgcatgggccagcattccacccatcagacactgcggtttggcctgatgcagatagttggtgagatggacgtgcgccatcatcacgtggtgctggatctggtaaagctcgcgcaacgttttatcgccacgcagatagccggtgatcagaaaagcctccggcgaatggtaaagattctgttcgttgaaggtcagccagtacttcaccttatcgccgtagcagtcgatcatcttctgtccatagcggataaaggcgtccattacccggcggtcggtaaaaccgttgtaacgctccgccagcgacaagggcatatcgaagtgatacaggcagatcatcggttcaataccgcgggcaatgagttcatcaataaactgatggtagaacgcaatcccctcgtcattaaactcgccatctccctgcggacagacgcggctccaggctatctggaagcgataacagttcatgcccaaatcctgcattagatcgaaatcttcgcggaagcgatggtaagagtcggtcgccaccttccagtccgaggcgaactccgacggttcgcggatatcgtacaccgacatccccttcccccctcattccacgccccttcggtctgcatgctggagaccgaattgccccataaaaaattggccggtagtttgtctttcatggttcgcctctgtatatgactagtcatttaaatgttatgactagtcatatacaaaaaaaccaccgctgaagcaaaagcaggatcgttttctgtgagccatacaaacaaaaaagatcgccgcaagcggcgatctttataagcaagaaaaacggcgttactgggcgtcaagctgcttacggcgatattcccctggcgctccagcatccacccgggtactcgcgcggcagcgcgctgacggcgtcaagctggcgcagctcatcttcactcaggcgaatagcggtggcggcaatattatcctgcaactgctcggcccgtttggcgccaataataacgctggtgaccgccggctgatgcagtaaccacgccagcgcaatctgcgccaccgagactcctttcgcttcggctatcacctgcatgacgtcaatgcagtcaaaggcgcgatctttattcaccggcgggaagtcgaactccaggcgacgaccgcccgcttccgcctgcccatcgcggcgatatttaccactcagcagaccgcccgccagcgggctccagaccatcaggccgagaccttcgctttgcatcatcggcaccagttcgcgttccaggtcacgcccggcaatcgtgtagtaagcctgcagagaagcaaagcgcgagagcccaaggcgttccgcgatgcccagcgctttggcgatttgccaggccgcccagttagaaacgccgatgtagcgcacgtgcccctgttgcaccagggtgtccagcgccgatagcgtctcttcgataggcgtcgccggatcgaagccgtgcaattgatagagatcgatatgatcgagctgcatgcgacgcaggctctctttcacgctgcccatgatgtggtagcgcgagctgccgcgcgagttcaccccggcggtgccggtttcgccgaacactttggtcgccaccaccacgttttcacgcggtatcttcagattctttaacgcctggccggtgatctcctccgagcgtccttctgaatagacgttggcggtatcgatgaagttgatgcccgcatccagcgcgcttcccaccagctgttcggcttccgcctggcgcagctggccgatttttccccacatccccttttcgccgccgaaggtcatggtgccaaggcacagctcagagacaaacaggccggtatttcccagtttttgataacgcatagcagtctcctcattcggatgattaacgtcagccagatagttatagcccgagcgtcgtcatcgcgaatggggtgttcctgcccgtttcttgcccaatcctctgaaaatcagcgccacagcgcgagcatggcgtaaccggtaagcgccgcccagatcagcagcggaatggaataaagatgaaaacgccaccagatccggcggtcgccggccatccgcagcgcaatcaggttcgccagcgatccgggcagcaggccaaaaccgccgacgttcaccgcccaggctaacaacatcgttggcggcacgtaattgagcagcaaaatagtcgacggcacgttgctgataaattgcgacaggcctattgccgtcagccacagcccgccatgcgagagctgaccgacgtcgttcagccactgctgcaacaccggcagttgcgtcagcaggtgaacgtcgataaacatcgccataaacaccagcagcagcgaccagtcgacgttgataatcaccgctcgcgccagcaacaggaacccgatggcaatgagcgccagtccccagagttcctgcttcatctccagcgctgccagaaagataaggtagaaagcgagacagctccataccagcttcggccgccactccggcgctttgtcgctactttgataattgagccgggcggcggggaaacagaaccaacacagcaccaatagcgtgatcatcatcgccgccgccagcggcagcatctggccgataaaggcaagaaacgatagtccggagcggccccacagtaaaatattctgcggattgccgatgggtgttaataaagagccggcgttaaccgccagcgcttcaaaaataatcaggcggttcaccgggatggcgcaccattttttcagcgttaacgtaaggggaacgacaatgaacagcgcgacgtcgttggtcaaaaaagtggaaagcagcgcggcagccagcaccatgaagatggccagttggcgttcggtgacgaaacggcgcgccattttgcgccccagcacatcaaaataaccactcagttcaatccctttggtcagcagcatcagaccgctgagcgtgatgatagtgtgccagtcgatagcctgcccccagcgctgaggcgcgaaaggaacaaacaggctaagaataatggcgatgagcaataaaagatgcaggaaacggtcgcgagcgagcgactgcacaaaggggagattcattctgcgtgtaatctctgggtaaacagcttaaattgcgccagcgtctcttcgctaacgtggtgttccattccctcggcgtcgcggcgggcaatctccggactcacgccaatcgccagcagaaagttttccacaatctgatgacgctcacgactttcatgggctagtttttccccttccggggttaagaagatcccgcgccagggatctgttcgatcaagccgacgctcgccagacgtttaagcattttcgccaccgtcggttgcgaaacgccaagacgcgcagccatatccacctggcgcgcttcgcccacttcgttgatcagatcggagatcagctccacatagtcatcaatcagctcgcgacgatgcgcttcgcgcacctgacgaaacccctctacgtgttcttcgacattaaccagctgcgtcacttttttagttatgggcttacctgcgcgacggttcattgtgcttcctcgttggtgtgacgcgtcaagcatcatataaaaggatccacattgtaatggattgcgcccgtagcacaaaaaaataacattttagccatagctataaaatatagcctgtgctatatctgtatgtaatgcaaacagccatcacggatttgacggcgcgaaaacgcaggaggaataaccatgaacgaattcaagaggtgcttaaacgtgtttagccattcaccctttaaagtacgcttaatgctgatcggcatgctgtgcgacatgatcaacggcaaaccgcagcaggataaacctaaccactaacgcggcgtcgcggtacgccgcttcatttttttgtcatttttccccgttaacctacccggttgcctcgcctttcagcgcttttttcaagttttgtaagctttctcgcaaaacaatctgttatgaatagttgaccttaccattcgcaggccctatcgtttgtcagccctgccactactgcggctcgcagagaccctcttcacgcactgtccagcaggttttaccccttgatgccagggacgaacatggcgtcttgttgattacgaattatgaatgtcactctgaaagaaacgctggccgcccgcagactggccctgaacccgtggacaggattctactttttacagtcgctgttgattaatctggcgcttgggtatgaatttagcttgctctataccgttgcgtttacctgcgtactccatcttctttggcgcactttcccgcgggtacaaaaaggggtcgttggcctctattccctgctggccgcaatgtactatcccttcggtcaggcttacggcgcgccaaacttcaatacgctgctggcgctgcacgcgaccaacgtggaagagtcgacggaaattctcaccattttcccctggtacaattatctactggcggtatttatcttcgccctcggcgtcattgccgtacggcggaaaccacagccgcccgcgcgcctcggcaaagtggaatatctggggctgctgtttagcatcggtatcttcttcctgcagccagtgcaaaacctggcctggggcggcgtctttaaagtcattgatagcggttatcccgccgtgcgcttcgtaaaagacgtgatcgttaataacaatgaagtgctggatgaacaggcgcggatggcgcagttggcgaacatgaaagatagctggcacgtgctggcggtgaagccgaagtaccatctctatgtcgtggtgattggcgagagcgcgcgccgcgatgcgcttggcgctttcggcggccactgggacaacacgccgttcgccagttcggtcaacggctatctgtttcaaaactacgtcgccgccagcggctccacgcagaagtcgctgggcctgaccctcaatcgggtggtagacggcaaaccccagtatcaggacaacttcgtcaccctcgccaaccgcgcgggcttccagacctggtggttctccaatcaagggcaaattggtgaatacgacaccgccatcgccagcatcgccaaacgcgccgatgaggtacagttcctgaaaaacggggattttgaagccaataaaaatacgcaggatgagcagttgctgaaactgaccgagcaggtcctgtcggtcgagcgcagccagccacagctgatcgtattgcatattatgggctcgcacccgcaggcctgcgatcgaaccaaaggcaagtacaccacctttgtgcagtcaaaggagacctcatgctatctctatagcgtgacgcaaaccgacgcgctgttggcgaagctctacggccagctacagaattccggtagcactttctcgctcacctatttttccgatcacggtctggcatttaaagaacgcggtaaagcggtgcagtatctcgcccatgatgacaaatatcagcagaacttccaggtgccgtttatggtgctctccagcgacgataaagcgcataagatgattaaagcccgccgctcggcgaatgattttctcagcttcttctcgcagtggaccgggatcagcgctcaggaaattaccccgcgctatcgctttatctcagaacagaaagccggaccggtgtatatcaccaatttccagttacagaaggtggactacaaccatctgggcagcgacgagtttaccgtcaactaaccggtatcgccgaattgcaggcaaaaaaaatccgccccttgaggcggattttttatatcaccgaagtgattagaagcggtaacctacaccggcaatccaggtgccgacgtcaacgttacgaatgcgagactgctcgtaggagaagtccagggcaacgttttcgatcgggttgaactgcataccagcgccgtaagagaaaccgtagtcgctcatgtcggatttatggttcgggaagtcgttgttctggaacttaccgtagccaacaccgattacaccgtagatgctcgcccagtcgttcagacggtaagccggaccagcggtgatgccgtagtactgacctttgttgtaagtaccgttgctggtgttgtctttttcggtgtaggtgaaggaaccgataacgcccagcgggttgttatcttgctcgtaacggtacttaaggttgaaaccgcctgctttgttggctttaccctgcatgtcgctctgagcgtaaccaccggtaacggtagaagttgcagcgaaagcagtagtacctacggatgcagccagaacaacggccagtgctgaaagacgtgcaattttattcataaccacctcaaatgtgtttctaataagtcctaagtcttaaatatatcaaaaacttttgggaaactcttttgactttacattgtctaacatactttttcatgtaagcaaaagtttccacgatttcataacaatctggaaatcaaacacttttcgcgcaaaaagtgtttaacgactgccagccgcaagcgctgcgcatccagattattcttagccgtggaggcattcccctacgcattttacgccattgtactgtttttccaccctcttttttcaacaatcgctaaaccgttaaccggttattccagtacactggaacctttacctcttttgacaaaccctgacaggagaaaggatgcccggctcgtcccgtaaagttccggcgtggttgccgatactggttattttgatcgccatggtctctattcagagcggcgcatcgctggcgaaatcgctcttcccgttaattggcgcaccgggtgtcaccgctctgcgcctgacgctcggtactttaattttagtcgttatttttaagccgtggcgactgcgctttgccccacagcagcggctgccgctgttcttttacggcgtggcgttaggggcgatgaactatctcttctatttatcgctgcagcgaataccgctcggcgtcgcggttgcgctggagttcaccgggccgctagcggtggcgctattcggttcacgccgcccgcttgatttcgtctgggtggcgctggccgtattggggctgtggttcctgctgccgctcgggcagaacgtaggagaagtggatttagtcggcgcgctgttcgcgctcggcgctggcgccttttgggcggtctatattcttaccggccagcgcgcgggtgaagaacatggcccggcgacggtggccatgggttcgctcatcgcggcaatcatatttgtccccatcggcatagcccaggccagcgatacgctgctgcaatggtcgctgctgccgctggggcttggcatcgccattctctccaccgcgctgccctattcgctggaaatgatcgccctgacccggatgcccacccgcaccttcggcacgctgatgagcatggagccggcgctagcggcgctgtcgggaatggtgttcctcggcgagacgctgactctgacgcaaactctggcgttagggccattatcgttgcctcaatgggttccacgctgaccatgcagcggcaaagcaaaatcgagaaagtcgatataaattaagattttgttaccgcactggcccgtgacggtatcgggccagccgtctcatgctaacaaattgaattaaaatgtttttttaaatagccaacaactctgtgctatcaaactgatatggaccgccgatgcctcatacccgatatcccttgctataattagtcccgaagtcatttgggacaaacgctctacataattcgaatttgaagtatgacgagtatcaatatcaagaggatatgaaactatgagtaccgcaaaactggttaaaactaaagcgtctaacctgctctacacccgtaacgatgtggcagacaatgagaagaaagcgactattgagctgctgaatcgccaggtgatccagttcatcgacctgtctctgatcaccaagcaggcccactggaatatgcgcggtgccaactttattgctgtccatgaaatgctggatggtttccgcactgcgctcaccgatcaccttgatacgatggctgaacgtgccgttcaactgggcggcgtcgctttgggcaccactcaggtcatcaacagtaagagcccactgaaaagctacccgctggatattcacagcgttcaggaacacctgaaagagctggcggaccgttacgccatcgtggccaatgatgtgcgtaaagctatcagcgaagcgaaagatgaagacactgccgatatctttaccgcggcttcccgcgacctggataaattcctgtggttcatcgaagcgaatatcgaataaacgtccgctgccgtcagcacccgctggcggcttttttcctttctcccacgctaccccccataaacgcttagctcgccctcttttggtgcatacgcttgtacacaatacgtactaaagtaaaacaattgtaataatcacctcacacaatcgttacagcaagattgttttcccatcagggtttgcgttaaaaatgctctggttattcgctacgtttatattgcaccaaaatgacgccctgttacggtgcatttgccgtcctggataaccgaaattgtgcaagggttatgaaagctcctgttgaaaaacaatggcttgtaaaactggcatgattttttcattaggctacacgttctcgcaggggctcgtcccgtggataaaaaaggaaatactatgaagtctgtattaaaagtgtcactggctgcactgaccctggcttttgcggtttcgtctcacgccgcagataaaaaactggtagtcgccaccgatacggcgtttgttccgtttgaatttaagcaaggtgataaatacgtcggcttcgatattgacctgtgggccgcggtcgccaaagagctgaaactggactacaccctgaaaccaatggacttcagcggcatcattcccgcgctgcagaccaaaaacatcgatctggcgctggcggggatcaccatcaccgacgagcgtaaaaaagcaatcgacttctccgacggctactacaaaagcggcctgctggtgatggtgaacgcgaaaaacaatgacatcaaagacgtgaaagacctgaacggtaaagtggtcgccgtgaagagcggcaccggctccgttgattatgcgaaagccaacatcaaaaccaaagatctgcgccagttcccgaacattgataacgcttatatggaactgggtaccggccgcgctgacgcggtactgcacgacacgccaaacatcctgtatttcattaaaactgccggtcagggcaagttcaaagcggtaggcgaatcgctggaagcgcaaagctacggtatcgctttcccgaaaggcagcgacgaactgcgcgaaaaagtgaacggcgcgttgaaaacgctgcgtgaaaacggcacctacaacgaaatttacaaaaaatggttcggtactgaaccaaaataataattaggcctacttcttgcggccaatccgccgcgggctccacggcgccagggtctctttgcccggcgccgtattcgcagaggctttctctgctttcgacacggtaacagtaacaggaacacattatgcagtttgactggagtgccatctggcccgccattcctattttgctggaaggcgccaaaatgacgctgtggatttcggtcctcggcctggttggcggccttatcatcggtctggtggccggctttgcccgctgcttcggcggttggatagccaaccacatcgcgctggtatttattgaaatcatccgcggcacgcctatcgtggtgcaggtgatgttcatttacttcgcgctgccgatggcgtttagcgacttacgcatcgacccgttcaccgccgcggtggtgactatcatgatcaactccggcgcctacatcgcggaaatcacccgcggcgcggtgctgtccatccataaaggtttccgcgaagcgggtctggcgctggggctctcccgccgcgagaccatccgccacgtgatcctgccgctggcgctgcgccgtatgctgccgccgctcggtaaccaatggattatcagtatcaaagatacatcgctgtttatcgttatcggcgtcgccgaactgacccgtcagggccaggaaattattgccggcaacttccgcgcgctggaaatctggagcgccgttgccgtcatttatctgatcatcaccctggtgttgagtttcattctgcgtcgtcttgaaagaaggatgaaaatcctgtgattgaatttaaaaacgtttccaaacactttggcccaactaaagtgctgcacgatatcgatctgaagatcaacaaaggcgaagtggtcgtgatcatcgggccgtctggttcggggaaatccacgctgctgcgctgcatcaacaaactggaagaaatcaccagcggcgatcttatcgtcgacggcctgaaggtgaacgacccgaaagttgacgagcgcttaattcgccaggaagccggaatggtattccagcagttctatctgttcccgcacctgacggcgctggagaacgtgatgttcggcccgcagcgcgtgcgcggcgcgtcgaaagcggcggcggaaacgctggcgaaagagctgctggcgaaggtgggtcttgcggaacgcgcgcaccactatccatccgaactctccggcggccagcagcagcgcgtcgctattgcccgcgcgctggcggtgaaaccgaaaatgatgctgtttgatgaaccgacttcagcgcttgacccggaactgcgccatgaagtgctgaaagtcatgcaggacctggccgaagaaggcatgacgatggtcatcgtaacccacgaaatcggctttgctgaaaaagtggcatcacggctgatcttcatcgataaaggccgcatcgccgaagacggcgacccgcaggttctggtgaagaacccgccaagcccgcgtctgcgcgagtttttacagcacgtagcctgatgcgcccggctctccccggtaaggggagagccgctttccagattcatcccaccgctccttctcctctgaccccttctatacttagcagtttgagatgcaatggaggcgcccatgccgtggatcctactgttgctcgctgcgctgtggatttcgccgctgtcggcggcgtcattgcccggcattccggcggcgacaaccgacaaaagcacagccagcgagcctgacctcgaacaaaaaaaagccgcctgggcggcattagctgacgtgctggataatccagactcgcggcaggagttaatcgatgagctgcgcaaagccgccgctacccagcccctgccgccgcccccacgctgaccccgccagaagtcaaagacgagcaaaccgtcctggaaagcgtgacggaaattagccgccagtatagcgagcgcctgtcgttacggttttcgcagctatggcgcaatatcaccggctcgccgcataagcctttccatgccgatgcttttcgcaatgccgctggcgacttcctgctgctggccgggctggtatttgccttctggtggttagtacgcctggcggcgctgccgctgtatcgcaaaatgggccattggggaaggcacaaaaaccgtgagcgcaataactggcttcagttaccggcaaccattgctggcgcgtttatcctcgacctgctgctgctggcgctaacgctgtttatcggacagctgttaagcgatcgtttaaacggcggcaaccgcaccattgcttttcaacaaagcctgtttcttaacgccttcgcgctgatcgagttttttaaagccattctgcgactgattttttgtcctcgtatcgccgatttacgacccttcaatatcagcgacgaacacgcaatgtactggaacttacgcctcagcgccctgagtagcctgattggttacgggctgatcgtggcggtaccgattatctccaaccaggttaacgtgcaaattggcgcgctggccaacgtcatcataatgttgtgcattacggtgtgggcactgtatctgattttccataataaacgcgctatcactcaggggcttatccatcttgccgaccgctcgctgcctttcttcagcctgtttattcgcgcttttgcgctggtctggcactggctggcctgcgcctactttatcgtgctgttcttcttttcgctctttgaccccggcaacagcctcaaatttatgatgggcgcgacgctacgcagcctggctatcgtcggcgccgcggcgctggtatctggtattttgtcatgctggatagccaaaaccatcaccctgtcaccagaaacccaacgccactatccggagctgcaaaaacggctcaacggctggatctccgcctcgctgaaagccgcgaggatcctaacggtatgcgtggcggtgatgctgttgctgagcgcctggggattgtttgattttcagcaatggctacacaatgatgccgggcagaaaacggtggatgtcctgattcgtatcgcgctgatcctgttcttctccgccgtcggctggaccctactggcaagcctgattgagaaccgcctgtcatcggacattcatggacgcccgctgcccagcgctcgcgccagaacgctgctgacgctgtttcgcaacgcgctggcggtggtcattaccaccattacgataatgatcttattgtcggaggtgggggtgaacatcgcgccgctgctggcgggcgccggggcattgggattggctatctctttcggtgcccaaacgctggtcaaagatattattaccggcatctttatccagtttgaaaacgggatgaacaccggcgatctggtgaccatcgggccattaaccggcacggtggaacggatgtcgatccgctcggtgggcgtgcgccaggataccggggcgtaccatattattccctggtcttcgataaccaccttcgccaactttgtgcgcgggatcggttcggtggtcgccaactacgatgtcgacaggcaggaggatttggataaagccaatcaagcgctgaaggcggcggtagacgatctgatggcgcaggaggagatccgcgggctgattattggcgaaccctcgttcgccgggctggtagggctgagcaataccgcgtttaccttacgcgtcagctttacgacgctgccgctgaagcagtggacggtacgctttgccctcgatactcaggtgaagcagcatttcgatcgtgccggcgtgcgcgcgccggtacaaacctggcaagtattgccgccgccgggcaacgcaaacccggcggcagagacttaaaatggacggcggcgctttgcgtcgtccataaagctccaggcgataaaacggctctgtttctgcccctgcgccatctctttttttaccacttttaccgcgccgacttcagtcagcaggcgatatagcggcggcagattgtcgccgcgggagaccagtgaggtaaaccatttaacctggcggccgaactgctggctctcgcggatcatctgcgaaataaaggccacttcgccgccttcacaccacagttcctgctgctggccgccgaaattcagtacgctgtcttctcccagccccagattacggcgtttacgctcgccaccggcacgcgcgctggcggcggaatcgtggaacggcgggttgcagagggtcgcatcataggtttcattcttatgaatgatgccggtaaagattgcctggccctctttctggcgtcgcagacgaatttgtcgggtcagccctgggttaccattgataatcgcctgggcgctggcaaaggcctgcgggttgacttcgctaccggtgaagcgccagccgtattcatgcgcgccaatcagcggatagatgcagttcgcgccggtaccaatgtcgagaatggtggcatttctcgggatctcgccactatcctgcgccagcagatcggccagatggtggatgtagtccgcgcgtcctggcacaggcgggcacaagaagccgtcaggaatatcccagtgttttaccgcgtaaaagtgcgccagcagcgccttattcagcgccttcaccgccagtggattagcaaaatcaatggtttgctcaccggccggattcagggtgatatagctttgcagctcaggatgagtctggcacagcgctggcaaatcatagcgttggtggtgacggttacgcgggtgcaaccccggcttttcggctttcatggcaatctcctttcaacagccgcgtaagatacccgttgacgacggcgcggtaaataagggagtctggatatcttcttatttcgctttctggtgctctatgtatttctatcaacctgccgaaggccacggcctgccgcacgacccgcttaatgccatcgtcgggcctcgccccatcggctggatcgcatcgctcgatagcgcagggcaacgtaatctcgccccctacagcttctttaactgctttaactatcgaccaccgatcatcggtttcgccagcggcggctggaaagacagcgtgcagaacattgttgaaacaaaagagtttgtctggaatctggctacccggccactcgctgaagcgatgaatgaaacctccgcctctattccgcgtcatgaagatgaattcctgcgcgccggattaaccgccgcgccgagccggatcgtccgcgccccgcgcgtggcggaaagcccggtccacttcgaatgccgcctgtctcagtgtattcagttgacgcgcgccagcggtgaaaccatcgatagctggctggtgctcggtgaagtggtcgccgtgcatatcgatgagtcgctgctggaagatgggatctatcaaaccgcgaaagcgcagccgattttacgcgccggcgggccgacggcctactacagcattgatgagagccagcgcttcgatatgatccgcccggacgctcgttaactttagcgtagcaaggctaacgtatgccgccacgggcgaatacctgggcggcaataagcgcgtaaagtgcttgtttgcccattattatttatccggtggttctgcgcatcacgacctaaacttaaggtatgtcccatgctgttaatgaggatatagccatgagaacctttctgcttgcacccgcttttatcgcgcttgccctcctcgcctcacccacactggccaacaattctgaaaccgctgcagtggccgttggcccgctgcgcccgtccggctcagtttccgcctccggcgccagcaccctcgacgatttacaggcgcaactggcgcaaaaagcccaccagcagggggcgattgcctggcgaataaacgccgctggaggcggcaacaaattagccggcagcgcgataatttataaataatccttctgccctcgtcgggaatacgcaggcggaaatccaggttcccaggacttggctgctcatttttcgcccccatattttctatactgtttatagtttgcaaacacgaggagcgcatcatggcatcaggttgggcaaacgatggagccgtccaggaccaaattgacagcacggtaaacgatgccgtcgcccgcgcccgtagcgagcttcctggcggagagagcaacaaattttgtgaagaatgcggagagcccattccggaagcgcggcgtaaggcgctcgccggtgtcagatactgcgtgaagtgccagcaggataaagatttacacaacaatacatattcaggatataatcgtcgtggctccaaagacagccagctacgctgaccttcctttaccgttcattaccgccgattaagctttcttttcacgcacgttttttggcgaaaaaagtagcaaaatgtgcctttagttgccatggcaactagtctgacgcttctggcacgtaagcagctaaaataatttattaataatcaataaattattattcattcaaaaatttcgatgaagactgtgaatttccttcgattttatctcgcggcaaaaagcgtgatacttatcacatcgacggaacatcgtcccctacagaacacactgcgagagattaattatgaaaaacatcaaatatgctgccgctgctatcgccctttccgctctgtccttcggcgcattcgccgctcagccggtaaccccagcccaggcagaaagcatgaataaaatcggtgttgtttccgctgaaggtgcaacgactctggatggtctggaagccaaactggctgctaaagccgatgccgctggcgcaactggctacagcatcacctccgctaacaccaacaacaaagttagcggtaccgcggttatctacaaataatcgcagcaacactctgaaatgccactgaattaaccctgaaaagaccttttaaatacccttgtttgcccgtccgagccaccggacgggcttttttttgtccgtttaccagcgttcggcaacctgcgccagaccattggcgagcgaactcgcctgaccggtagcgaccaggcagcaggcaagctgaattttcagcgactgcggaaccggctcgctaccgctcacgcagtgctcaatccagcgtgcggttatttcggggtctttggactccggcaatgccaccttctcctgcagaatatcgtcggcccgctcatgcaacactctggttcccgccgcatcaatcaggttaatttgcgggcagcgctgcgggttggcatagacttcaccttcggtaccgtgcatcaacagcgcccggccaccgatctgcgtaaagaacgccgcgaccttgccgacatattccggatgcgacacgctcgacagacgcagcgcggcatcttcagcgaacggcgtagccagcttagccagggtatgggcactgttgcgcacccccatccgccaacgcaatgccagctgcttttccagcggcgggcacagcgccccgaccgggatatagaccggctcatggctgtcgagacgcgcctgggcctgacccgcgtgggtggtggccgggatccccatcagcgcaaatatggtctcggtcagaacgcgggttggatcatggctgacgccgtgaaccaccaccgggaaaccgagtttatgcaacagtaccgccagcagcggcgtcaggttggcctgtttgcgtgcgccgttatagctagggataacaaccggcatcggtttcgctaccggcggcgtcaggcggatggtctgtagctgcatcgcctcatagaagccctgcatttcggcttcgccttcgcccttgatgcgcagcgcgatgagaatagcgcccagttccagatcgtccacttcgccgtttagcatccgcgtataaagcgcacgggccgtgactaaatccaggtcgcgagcgtgattttttccgcgcccgacttctttgataattttggtgtaatccatcgacttgctccctccagcggtaggctctgccgaccgtaccgcttatgcgcttagcggcgtcggcgacgcgtctgttttgctttgctttttactataacctcgggaacgcccggctgctctatgggaaataccggtaacgcatttaacaatcgcgcaccgtaatttttagtcagcaggcgcttatcgtaaataatgacttcgccccagcactgatggctacggatcaggcgcccgacctgttgaatcaggttgaatgaggcgctcggcaggctttgcacttcaaagggatagcggttgaggcttttcaaccactcgccttcggtgatcaccaccgggctgtcgatcggcgggaaggcgattttatggatatgcacctggcttaacagctcgccctttaaatccagcccttcggcaaaagattgcaggccaaccaacacgctgcgctcgccgccttccacgcgtttacgatgcagctcgaccagccgatagcgcggctggtcgccctgcaccagcagcatcaggcgcagatcggtaacatgctccagaaagcgattcatggcacgcccgctggcgaacagcaccagcataccaagatgctttttgctctcgacctgctcacggaaaaaagccgccatttcggcaatgtgctgctcttcgttatcaataagcggctcatagcgcatctgtggaataataatttttccctgctcgacgtgattgaacggcgagcccagcgccacgaaacgatcgcctgctttctctttaagaccgctcatctcctgcagtcgcgaaaagctattcaacgaacgcagggtcgccgaggtgacgacaatatgcggcacgctgcgccacagcaggcgttcgagctgatcgctgacgcggatcccgacgcagtggaaccagacatggatctggccatcgcgaatctcgcgggtggcccacttggtcaccggcgcgccggaagactgcgccattgaggccagccgccacagcttgctctggctttcgaacatgccaagcgcccggttcatctgcagcaggatacgatgcagacgcaccacatcgtggctgccggtcttttcgctgaggtcgttcagaaacagctccgccagcccgcgtagcatttcggtgagcttggccagcctctggcaaatctccatcacttcttgcggcagttcgcccattgggaagcgatgctccgcttcctgggcggcaggcatatagagattgaggatattattgagcgaggcgataagctcatacagctcttcgcagtgttcatttaaccgttccggattggccaacggcggcgtggtcttcggacggaactgctccatacaggtcgccaccagcttgctgaacagatccaactgcagccggtaccagggcgaggttatctccgcgctcatctctaaggcatcgcgggcgacgtccggcagatggtggccttcgtcgagcaccagcagcaggtttttcggctccggcagcaccgcttcgctctccatggccgccatcaccagcgcatggttggccaccaccacttccgcttcctggatttcgcgccgggccacgaaaaatgggcattcacggtagtagtggcagttgcggttaagacagctggctttatcggtgctcagccgccccacagggcatcatcaatgggcttgtcggtatggtcgcgcaggccgtcccatttatagccgtcgagatcggttttcagcgtcgcacacagcttttgttcggcctggttttttggcgtcagatcgtcatcgaggaacgccagcagatcctgctgcgtcgcctcagtactagccagcgccgccagattacgcgggcaaacgtagcggccgcggccaaaagcggcggtaaagcgcaggtcgggaataattttgcgcagcagcggcaggtctttactgtagatttgatcctgcagcgcgacgttggcggtactgaccaccagcgttttttgttcctcacgggcgatggcgatgccggggatcagatatgacagcgttttgccgacgccggtcggcgcttcgatagccagatgccgcccctcttccccggcaagcgttttcgccacatcggcgatcatctgccgctgcggggctcggggaataaaatccgggatctgttcctgaagcgccttataccaggcggcgatttgcgcttttagcgcagcggtcaaagccatgagaaaacctgaatactgtataaacagccactattgtgccatttttgccggccaggaggtattgctttctgtagagggtggaatcgcgctcgataaaaaacgcaatgaacggcaaaaaacggcccgccgccgcgcacgcggacagacgggccggggtgacgcctgagcgcttttatcgctcccaggcaacagcatattattcgccggcaggtttacgcgggcgacggcgacgcggtggtttaccgtcctgagtacgcgctttcggcgcttcgccatcctgacggcgcggcgcctgctggctacggccctggctctgaccgccgcgtccttgcccctgaccgcggccaccgccaccacgctgctgacgaccgttttgaatcggctccgctttaatcgacggatccggctcgtaaccggcaatagcaatacgcgggatctcttttttcagcaggcgttcgatatcacgcagcagcttatgctcgtccacgcagaccagcgacagcgcttcgccggtcgccgccgcgcgtccggttcggccaatccggtgcacgtaatcttccggcacgttcggcagctcatagttgaccacgtgcggcagctcttcgatgtcgagcccgcgtgcagcgatgtcggtggctaccagcacacgaatgccgccggatttaaagtcagccagcgcacgggtacgcgctccctggctcttattgccgtggatggcggcgctacggataccgtctttattcagctgctccgccagatggtttgcgccgtgcttggtacgggtaaagaccagcacctgctgccaattgccttcgccaatcagctgcgagagcagttcacgcttacgtttcttatccacaaagtgaacgtgctgggtgatctgctcagacgcggtgttgcggcgcgccacttcgacttccagcgggttatgcagcagtttttccgccagcgccttgatctcatcagagaaggtggcggagaacagcaggttttgacgacgcggcggcagtttagccagcacgcggcggatgtcgtggatgaagcccatatccagcatgcggtcggcttcatccagtaccagcacttcgactttatccaggctgaccgcgttctggtgttcgagatccagcagacgacctggggtggcgacgaggatatcgacgccgccacgcagtttcatcatctgcggattgatgctcacgccgccgaagaccaccagcgagcggatattcagatatttgctgtagtcgcggacgttttcgcccacctgcgccgccagttcgcgggtcggcgtcaggatcagggcgcgaaccggacggcgccccttcgcgtgcggctgatcctgggtcaggcgctgcagcagcggcagcgtaaagccggcggtcttgccggtcccggtctgggcgctggccatcagatcgcggccctgcagtactgccgggatcgcctgctgctggataggggtcggctcaacgtagccctgctcggcgacggcgcgcaggatatcgggattcaggccaagggaatcaaaagacataacaactccgaaccgccccggcccgtttaagggcgtagttttcagggagattattgcgatagagatggcaaaaaccacaatgccatgaaggggcgcagtctagcagattttgtgacgaaccgcataaaatatccccgcaggaattaccagcaaaataatgctcgcttgcaccgggtaacttttagtcttcatcattgtggacagttcagcaaatcgcccctattcttaatcaatcgattgattaattttttagagtgcgatgaacagtacctccgttaccagtaaaggcgaacaagccaaaagccagcttatcgccgccgccatcgcgcaattcggcgagtatggcctccatgcgacgacccgcgatatcgccgcgcaggccgggcaaaatatcgccgctatcacctattatttcggttcgaaagacgacttgtatctcgcctgcgcgcagtggatcgccgactgtatcggcgagaatttccgcccgcatgccgaggcggccgaagccctgttggcccagacgaaacctgacaaaccggcgctgcgggaattgattctgcgcagctgccgcgatatgagtctgctgctgacccaggacgacacggtcaacctcagcaaatttatctctcgcgagcagctctcccctaccgcggcttaccagctgatccaccagcaggttatcgccccgctacatagctatttgacccggcttatcgccgcctggaccggacgtgatgctaacgatacgcagatgattctgcacacccacgccctgcttggcgaagtactagccttccggctcgggcgggaaactattttactgcgtaccggctgggcgcagttcgatcaacaaaaggctgaacagatttttcaggtgatcacctgtcatatcgatttcattctgcaagggttagcgcaaaggagcctgggatcatgaaaaaacccgtcgtcgttctattggtcgtcatcgtgctcgccgcgctcggcggcggctggtggtggtatcaaagcagccaggcaaaagatctcactctctacggcaatgtcgatattcgcactgtgaatatgagcttccgcgtcggcgggcggctggcaaccctgaacgtcgatgaaggcgatgaaattcgccgtgggcaaaccctcggcgaacttgaccgcgcgccatatgaaaacgcgctgcagcaggcgcaggccaacgtctccaccgcccaggcgcagtacgatttgatgatggcgggttaccgtgccgaagagattgcgcaggcggcggccgcggttaatcaggcgcaggccgcctgggtctatgcgcagaatttttatcaacgtcagctcggcctgcgcgccagcagcgcgatatccgccaacgacctcgaaaacgcccgttcttcacgcgatcaggcgcaggcgaccttaaaatcggcgcaggataaactacgtcaatatcgcgccggtaaccgcccgcaggaaattgcccaggccaaagccagccttgaacaggcgcaggcggccctggcgcaagccaaactggacctgcatgataccgtactgaccgcgccgtccgacggcaccttgatgacccgcgccgtcgaacctggcaccatgttaaacgccggcggcacggtgctgacgctgtcattaacccatccggtgtgggtacgcgcctacgttgacgagaaaaatctcggccaggcgcagccggggcgcgaagtactactttataccgatagccgtccgaacaagccctatcacggtaagatcggctttgtctccccagcgccgaattcacgccgaagaccgtggaaacaccggatttgcgtaccgatctcgtctatcgtctgcgcatcgtggtgaacgacgcagacggcgcgttgcgccagggcatgccggtgacagtctccttcagcaacggaaacgggcatgagtaaggacgtcatcaccgttaacggcctgtcccgttgttttccaggcatggataggccggcggtcgcgccgctgcactgtacgatccacgccggatacgttaccgggctcgtcggccccgatggtgcgggtaaaaccaccctgatgcgcatgctggccggtttacttaagcctgatgagggcagcgccagcgttatcggcttcgatccgctgaaggacgacagcgcgctgcacgcctcgctcggctatatgccgcagaaattcggcctgtatgaagatctgacggtgatggaaaacctgaacctgtacgccgatctgcgcagcgtcaccggcgaggcgcgcaagaaaatattcgagcgcctgctggaattcacttctcttggccctttcaccgggcgattagccggcaaactctcaggcggcatgaaacaaaagctggggctcgcctgtacattggtgggcgatcccaaagtgctgctgttagatgagcccggcgtcggggtcgaccctatctcgcgccgcgagctttggcaaatggtgcacgaactggccggcgacggcatgctaattttgtggagcacctcttatctcgatgaagccgagcagtgccgcgatgtgctgctgatgaacgaaggtaaactgctttaccagggcgaaccgaaggcgctgacgcaaaccatggctgggcgcagctttctggtctccagccagcaggaaaacaaccgccgcctgttgcagcgggcgctgaaattgccgcaaattagcgatggcgtgattcagggcaaatcggtgcgtttgatcctgaaaaaggcagcccgcattgatgaggttcagcaacatgacgacatgccgccgctacaggtggctgaaaccgcgccgcgttttgaagacgccttcatcgacctgttaggcggcgccggaaccgccgaatcgccgttaggagagattattcatcacgttgacggcaacaaagatgaaacggtcattgaagcacggtcgttaacgaaaaagtttggtgatttcgccgccaccgaccacgtggatttccaggttaagcgcggtgagattttcggcctacttggccctaacggcgccggcaaatccacgaccttcaaaatgatgtgcggcctgctggtgccgaccgacggaaaagcgctggtgctggggatggatctcaaggttagctccggtaaagcacgtcaacatttaggctatatggcgcaaaaattctcgctgtacggcaacctcagcgtcgaacagaacctgcgttttttctccggcgtttacggcctacgcggccgggcgcaaaatgaaaaaatcgcgcgcatgagcgatgccttcggcctgaaaagtatcgccggacacgccgccgacgagctaccgctcggctacaaacagcggctggcgttggcctgctcgctgatgcatgaacccgacattctgtttctcgatgaacccacctccggcgtcgacccgctaacccgccgcgagttctggctgcatatcaacagcatggtcgataaaggggtcacggtgatggtgactacccactttatggatgaggcggaatactgcgaccgcatcgggctggtctaccacggcaagcttatcgccagcggcacgccggacgcgctgaaggtgcaggcggcgaatgacagtcaggcggatcccaccatggaacaggcgtttattaccctgattaaccaatgggacaaggaaaacggtcatgagcaatagcattctctcctggcgacgggttcgcgcgctgtgcgtcaaagagacccgacagatcgtccgcgatcccagcagttggctgattgcggtggtgatcccctgctcctgctgtttatcttcggctacggcataaacctcgactccagtaaactgcgggtcggcgtattgctggaacagcagagcgaagaggcgctggatttcgtccataccatgaccggctcaccctatatcgacgccaccgtcagcgataatcgccagcagttgattgagctgatgcaggccgggcgcatccgcgcgatggtcgtcattcccgtcgactttgaccgtcagatggcccgcgccggcgccaatgcgccgattcagttaattaccgacggtagcgagccgaataccgctaacttcgcgcagggctacgtcgaaggtatctggcagatctggcaacagcagcgggcggaagaccgcggtgagacctttgaaccgcttatcgacgtgcagatgcgctactggtttaacccggcggccatcagccagcactttattatccccggcgccattaccatcatcatgaccgtggtcggcgcgatattgacctcgctggtggtagcgcgcgaatgggaacgcggcaccatggaagcgctgctatccactgaaatcacccgcgccgaactgctgctgtgcaagataattccctactatttcctcggcatgctggcgatgttgctgtgtatgctggtatcggtatttattctcggcgtgccctatcgcggctcgctgctgattctgtttgtcatcaccagcctgtttttgcttagtacgctgggaatggggttactgatctcgaccattacccgcaaccagtttaacgccgcgcaggtcgcgttgaacgccgcttttttaccatcgattatgttgtccgggtttattttccagatagacagtatgccggcggtgatccgcgcggtgacctacgtgatcccggcgcgttatttcgtcaacaccctgcaaagcctgtttctggcgggcaatattccggtggtgctgctggtaaacgtgctgtttttgattgcttcggcggtgatgtttatcggcctgacgtggctgaaaaccaaacggcgtctggattaaccctgcgctcgaattttgcccggtggcgctacgcttaccgggactacgataagtttcggtcgcccgggtccgacatgaggaaggttctatgtttcatcgtttatggacattaatccgcaaagagctgcagtcgctgctgcgcgaaccgcaaacgcggatgattttaatcatgccggtgctgattcaggtattgttgtttccctttgccgccacgcttgaggtgaccaacgctaccatcgctatctataacgaagatagcggccgccacgcggtggagctcacccagcgctttgcccgcgccaaagcctttacccacgtcctgctgctgaaaagcccgcaggcgattcaaccgatcatcgatgaacaaaaagccctgctcgtggtgcgcttcccggcggatttctcgcgtaatctcgacaactatcaaaccgccccgctacagctactgctcgacgggcgtaactccaacagcgcgcaaatcgccgctaactatctacagcagattgttaaaaactatcagcaggatgtgctgcaggataaagcgaaaccgaacaacagcgaactggtggtgcgcaactggtacaacccgaatctcgactataaatggttcgtggtgccgtcgcttatcgccatgatcaccaccatcggggtgatgatcgtcacctcgctgtcggtggctcgcgagcgtgaacagggtaccctcgatcagctgttggtctcaccgctcgccacctggcaaatcttcgttggcaaagccgttccggcgctgatagtcgccacgatgcaggcgactatcgtgctggcgataggtatctgggcttatcagatcccgtttgccggctcgctgctgctgttctatttcaccatgctgatttacggtctatcgctggtgggctttggcttattgatttcttcgctgtgttcaacccagcagcaggcatttatcggcgtgttcgtctttatgatgccggcgattctgctatccggctacgtttcaccggtagaaaacatgccgcagtggctgcaggatttgacctggataaacccaatccggcactttaccgatatcaccaagcaaatttatctgaaggatgcgagtctgaagattgtgtggggaagtttgtggccgctattagtcatagcggccaccaccggctcagcggcgtacgcgatgttccgaagaaagattgcgtagctttttatctttcgccagcagcgataccaccgccgggcctgccagtatgaccagcccggcgagggccagcagcaggttgttgtgcagcacgcgcgacaacaaccagagcactatcatggcggcgccgaagtaccaggtcgtggtgagttcctcaaggaagtcccccacgtcgcgccagcgcgcttcatggtgacgctgcaaaaacagcatcgccagcagcgtgacgccgtacagtacacacagccctaatccgacgcgcaccagcgcgccgctcagccaacccatcaccagtaccgccacgaccagtagatgcaacataatctgccagcaactaagacccgttgcgacgcgtacacgttgttgccacttcatggcttctctcctgaaggatttttctctgttactcagagtaccgcactttacggaaaattccgtatcaccgcatctttttgtgacgtctactacactattttattcaggaaagtgacattaactggagaattatggctgagccaacgtcgcgaatttcggtgaacgtgctgacaattaacacccataagggctttacggcgtttaatcggcgttttattttgcccgaactgcgcgacgccgtacgcagcgtcagcgccgatatagtttgcctgcaagaggtaatgggcgcgcacgaagtgcaccctttgcatatcgaaaactggcctgataccacccattacgagtttcttgccgacaccatgtggagcgattacgcctacgggcgcaatgcggtctacccggaaggccatcacggcaatgccgtactgtcgcgctttcccattgaatattatgaaaatcgcgatatctcggtcggcaatggcgaaaaacgcggcctgctttactgccgcatcgtacctccgcacagcggcacgacgatccacgttatctgcgtgcatctcggtcttcgcgcgcaccagcggcaggcacagttaacgatgctggcagagtgggtcaatacgctaccggcaggcgatccggtggtggtggcaggcgacttcaacgactggcgccagcaggctaatcagcccttaaaagcgcaggcagggcttgaggagatttttacccgcgcccgcgggcggcctctacgcacctttccggtcgctttcccgctgctgcgcctcgatcgtatttacgttaagaatgcacatgccagccatccgaaggcgctggcgcttaaacactggcggcatctgtccgatcatgcgcccctgagcgtggagatacatctgtgaaatgtcgctggcaggaaggcaatcgtattaccctactggagaatggcgaccagtattatccggcgttattcgccgccattggccgcgcgcagcgcaaggtgatccttgaatcctttatctggtttgaagacgaggtgggctggcgactgcatgcggtgctactgaaagccgcccgccggggtattcaggtggaagtgctgctcgacggctacggctcgccggacctcagcgatgagtttgtcggcgaactcaccgccgctggcgtggtcttccgctactacgatccgcgcccccggctaatgggtatgcgtaccaatttattccgccgcatgcatcgaaaaatcgtggtgattgacgacacaaccgcgtttgttggcggcattaactactctgccgagcacatgagcgattacggaccggaggcgaaacaggattatgccgtgcaggttgaagggccggtggtgctcgatattctccaattcgaactggagaacctgcccaccagcgaggcagcccgccgctggtggcgacgccgtcggcatcagccggaaattaaccaaacccctggcgaagcgcaggcgctgtttatctggcgcgataaccatgaacatcgtgacgatattgaacgtcactatctgaaaatgctcaccagcgcccgccgcgaggtcatcatcgccaatgcctatttctttcccggctatcgtctgctgcacgcgatgcgcaatgccgcgcggcgcggcgtacgggtgaagctgattgtccagggcgagccggatattccgattgttaagtttggcgcccacctgctgtaccactacctgattaaaggcggcgttcaggtgtatgaataccgccgccgtccgctgcatggcaaggttgcgctggcggacgaccactgggccaccgtcggttcaagtaatctcgacccgctgagtctgtcgctgaatctggaggccaacctgattatccacgaccgagagttcaatcagaccctgcgtgataacctcaacggccttatcgccagggactgccagcagatagataaatccatgctgccaaaacgtaactggtggcggctcggcgtcagcgtgctggcgttccactttctgcgccacttccccgcctgggtcggttggctgccggcgcataccccgcagttagcaagggtcagcccgccggtgcagccggaaattgaaacccaggatcgggtagaaacgcaaaccagagacaatccgctatgagcaaatcgcatccccgctggcggatggcgaaaagagtgctgaccgcgctcttttttatcgccgtcatcgtattgctggtaatttacgcgcaaaaggtcgactggcaggatgtatggaaggtcatccgcggctacgatcgtctggcgctatttagcgccgttgggttggttatcgtcagctacctgatttatggctgctacgatctgctcgggcgagcctggtgcggccacaagctggcaaaaaaacaggtgatgctggtgtcgtttatctgctacgcctttaacctgacgctcagcacctgggtcggcgggatcgggatgcgctatcggttgtactcgcggctggggctgaacggcggcactattacccgtattttctcgcttagcattaccaccaactggttgggctatattctactgggcggcgtcattttcaccgcgaatctggtgacgttgccgccgcactggtacatcagtcaaaccacgctgcgtattattggcggcgttctgctgcttttaaccctgatctatcttttcggttgcgccttcgccaaacgccgccacatgacgattaagggacagcggttggtgctgccctcttttcgtttcgctctactacagatagggatttcagcggcgaactggatggtgatggggcgattatctggctgctactgggcagcgagattaactattttctggtgctgggcgtgctgctggtgagcagtatcgccggcgttatcgttcatattcccgccgggattggcgtgctggaggcggtgtttatcgccatgctctccggagagtcgatttcgaaggggcgataattgccgctctgctggcgtggcgcgcgctgtactattttctgccgctgctgctggcgacgatcgcttatctggtgctggaaagtcgggcgaaaaagctacggcagaagaatgagcgcaagctggcccgtggatgaaacggcccggttgcgcttaccggcgacatttttgcggattgcctggattggtagcccggataaggcgcatcgcgccgctatccgggataagattaacggcggttgccgaagatacgcagcagcatcaggaacaggttgatgaagtccagatacagcgttaaggcgccgagaatcgagtatttacgcagcgtggcgctatcgcgggtatcaatctgctcgccgatgtttttcagcttctgggtgtcgtaggcggtcaagccgacaaacaccagcacaccaatgtaagttaccgcccacatcagcgcttcgctcttcagccacaggttaaccagcgacgccagcacgataccaatcagccccataaacagcatgctgccgaagccgctcagatcgcgcttagtcgtgtaaccatacaggctcatcgccccgaacatcccgccggtcaccacaaaagtgctggcgatagacgaataggtataaacaataaagatgctcgctaacgttagccctgttaacgccgaataaagcataaacagcgtcgtcgccatacccgcgcttaagcgctgcaccatccccgagagcacaaacaccagcgccagctgggcgatgatcagcccgaagaaagtgattttgcttgaaaagacgaacatcatgaccgccggggtattagccgcaaaccacgcgataaacgcggttaacaacaacccgaccgtcatccagccgtaaacctgcgccatgtaggtctgcaggccgctgcggctctgaacaattgaatcggaacgagggaatctgtccatgactatctcctgattaacaagtttctctcagtaagcgtatcacactaccagcgctctgccgcctgatgatcgctgtcgcgggcatcgacccagcgttcgccttccggcgtcgcctctcgtttccagaacggcgcgcgggttttcaggtaatccataatgaactcgccggcggcgaaggcgctgccgcggtgggcgctggtcacgccgacaaaaacaatctcttcgcccggccacatttcgccaatgcgatggataaccgtcacccggccaagcggccaacgttcccgcgcctgttcgacgatttccgccagcgatttctcggtcatgcccggatagtgctccagcgtcagcgctttcacgctgtcgccgagattgtgattacgcactttgccggtgaaggtgaccaccgcgccgtcttcatcgcgctcggccagccacggatactcatcgccgacacaaaagcgcgccgggctaaccacgatacgagtttgcgtcatcttagccccggtgaccggcgggaaaaacgccacttcgtcgccgctcgcgaccggatggtcaaacgaggtcagcgtctggttgaccgccgccagcaattttccttcttccagcgccagcgcccagcggtctccgcgcacggcaagctgctgacgcacggcttcaacggttggcaattcgctggcgtcgagagtcagggtatcggtgccaaccagttcgcgcacctgggcaaaaaacaggacgttaatcatgggcttcctccaccttaaaatcgccggacttgccgccgcttttcgccagcagacgtaccgggccaataaccatatctttttgtaccgctttacacatatcgtagatggtcagcgcggcaaccgaggccgcggtcagcgcttccatttctacgccggttttaccggtcaggcggcagagtgactcaatgcgcacgcggttatgttccggctgcgcctgcaggttcacttctactttgctgagcatcagcggatgacacagcgggatcagctcccaggtacgtttcgcggcctgaataccggcgatacgcgcggtggcgaatacatcgcctttatggtggctgccgtcgataatcatcgcaagcgttgcggcctgcatttcgacgtaagcctcagcgcgcgcctcacgcaccgtttccgctttgccggaaacgtcaaccatgtgggcttcgcccgcggcattaatgtgggtcagttgtgacataaactatttctttaaatgaggaatgaagttgcacgggcgagtacgcgcatccagctgtggcgcgataatattttcccacgcggtggcgcaggctttggtcgagcccggcatagcgaaaatcagcgtgcggttggcaacgccggcaacggcgcgggactgcagcgtagaggtgccaatctcttcaaacgagagcatacggaacacttcgccaaaaccttcgacctcgcggtcaaacagcggcagcagcgcttccggcgcctgatcgccatcggtaaaaccggtaccaccggtgatcaacaccacctgcacctcatcgctggcaatccacgccgaaacctgggcgcgaatcgcgtagcggttctctttcacaatagccttatcgacgagggtatgtcccgcttcgtgcagcgcatcgcgcagccagtggccggaggtatcgtcctcttcgccgcgacggttggaaacggtaagaatagcaatacgggtcgggataaactcagcgctagcctggctcatctgaatgctcctttcgaaaacgattatccgccaatatacgacaggttctgcgtaataccggtgttgccctgatgcaggaaatgggtctgctttttatgggttaaggcttcggctatccgcgcttccaaatcggcctgctgttcgtcctcggccatcaggtcgcgcaggtctacgccgccttcaccgaacagacacaggtgcagtttgccaacggatgagacgcgaagacggttacaggtggcgcagaagtctttttcatacggcatgattaagccaatttcgcctgcataatccgggtggcaaaagacctgtgccgggccatcgcttcgttgacggatctggtggatccaaccgcggcgcagcagttcatcgcgcagcaccatgccggaaatgtggtgacggcggaacaggtcgctgccctcaccggtttccattaactcaataaaacgcagctgaatacgacgcggtttgatccacgcgaggaaggtgtcgagctgatgatggttaacatcacgcatcagcacggtgttgaccttaaccttatcaaagccggcagcaaaggcggcgtcaatgccctccatcacctgttggaatttatcctgaccggtgatggcatggaattggcgagcgtcgaggctatcgacgctgacgttaatcgccgtcagcccggcatcgcgccagcgttcaacatcgcgcgccagacgataaccattggtggtcaccgcgatctgacgaatcgcgttgttttcacgcacggcggcaataatctcggtaaagtcgcgacgtaaagagggttcgccgccggtaaggcggactttttccgtgccaagggcggaaaaagcgcgcgtcacgcggcgcacttcgtctacgctaagaaagcccttgttcgtcacggcgccgggcttgtagccgtccggcaggcagtaggtgcaacgaaagttacacacgtcggtaatcgacaggcgcaagtaataaaacttacgcgcaaatgcatcagtaagctgtgaggccatatacacctttccaagtacgggaggcgtggtcatttctttccacgccctggcgacagcgcagctgtcgcggccagagcaccatatcttgcgacacaggtactaaggctagagtgttagttggttatgccgatagtagcgctttaacgatggtttcgccattttcattttcgctatataatcatctacatatcgctaatatcttgcattttcagtacagaatagccaaaaatcacgctttaacattgatatcggtcagtttgacggaaaccgggcattatcttttaggggtagatcggatacgctaaacccgaacattgaacagaaggaattcgtatgcgcaatcgcactttcgccgatctggatcgcgtcgtcgctcttggcgggggccacggtctggggcgggtgatgtcgtcgctctcgtcgctcggctcgcgcctgaccggcatcgtgaccaccaccgataacggcggatcaacggggcgaattcgccgctcggaaggggggatcgcctggggcgatatgcgcaactgcattaatcaattaatcgccgaacccagcgtcgcttccgcgatgtttgagtatcgttttggcggcaatggcgagctttccgggcataacctcggaaatctgatgttaaaggcgctggatcacctgagtgtgcggcctttagaggcgatcaatttgatcagaaatctgcttaaagtggatgctttcctgattccgatgtcggagcaaccggtcgatctggtggcgctggatcatgaaggccatgaagtgtatggcgaagtgaatatcgatcagctggatcacgtcccgcaggaactgatgctcagcccaccggttccggcgactcgcgaagcggttgaggccatcgccgaggccgatctgatcctgattgggccagggagcttctacaccagcctgctgcccattttactgctcgacgaaatggcccaggcgctgcggcgaaccccggcgcccatggtatttatcgataacctgggtaaggaacatagccctgccgccaatctgacgctggcagacagaatgactattctggaacattacgtcggcaaaaaagtgattgatgccgccatcgtcgggccgaaagccgatgttaagggtatggaagaacgtctggtgattcagaccgcgctggacgccagcgatgtcacctatcgtcatgaccgcgtgctgctgcgccaggcgctggagcaggctattcaggcattaggttaatcctcaaccggcaatcttttaaacaagatgacgcctcagattaaaatcttaaggttgtcttaaaatatcgctgtcaacataacgagcatctcctactacgggtattcgttatgtcgtttatttctttacgtcggccggtactcggccgcacggcttatttgattctctttgcctgttatatcggtatctttcttaacctggctttttatcgccaggttttcccgctactgccggtaaacaatctccataactggctggttttccttagcatgccgatcgtggcaattagcgtgatgaacatcatcaccaccctcgcctcgttcttaaaactcgaccgggtggtcatcagcctgtttattctgctgagcgcctcggcgcagtactttatctggaccttcggcgtggtgatcgatcgttcgatgatcgccaatatcttcgatacgacacctgcggaaagttttgccctgctgtcgacgcaaatggtcatcgtgctgggtctctccgggctattgatggttctggtcgcctggtggattaaagttcgcagaccggcctctttctggcgcggcgcggcgatgcgcctgctcaatatcgccgtttcagcgctgctcattgtgctggtggcggcgctgttctacaaagattacgcctcggtgttccgtaacaataaggagctggtgaaatcattgagtccatccaatagcattgtggcgctgaactcgtggtatgcgcataaccggatggataacctgccgctggtgaagatcggcgaagatgccaaacagaaagcggtgatgcataacggcgcgcgtaaaaatctgaccatcgtggtgctgggcgaaacctcgcgcgccgagaatttttcgctgggcggctacgatcgcgaaactaacccgcgcctgaaacaggacgacgtggtgtacttcccgaaaaccacctcctgcggcaccgcaaccgcggtttccgtcccctgtatgttctccaatatgccgcgcgcgcattacgatgaagaactggcgcaccatcaggaaggcgttctggatattctacagcgcgccggtgttcaggtgctgtggaacgacaacgatggcggctgtaaaggcgcctgtgaccgcgtgccgcatcagaacgtcaccaacctgaacctcagcggcgagtgcattgatggcgagtgttacgatgaagtgctattccataagttggatagctatatcgataatttacagcaggatggcattatcgttctgcacaccattggtagtcatggcccgacctattacaaccgctacccggctgaattcaaaaaattcaccccaacctgcaataccaatgaaatccaaagttgtacgcaacaacagttgaccaatacctacgacaacaccattttgtatgtcgactatgtggttgataaagcgataaaattgctgcaatcaaaacaagatagatttaccaccagtctggtgtatttgtctgaccacggtgaatcgctgggtgaagatggcgtgtatctacatggcctgccgtactccatagcgccggacacgcaaaaacacgtgcccatgctgctctggctgtcgccggattatcagcaacgctatggcgtatccagccagtgtttgcaacaacaggcgaagacgaacgattattcacaagataatctgttctctaccctgcttggcctgctcggggtagacacccgcgagtatcaggcaaaagacgaccttttaacgccatgtagagagaccggcagatgaaaatcttagtcattgaagacgatgcgctcctgttacaagggttaattctggccatgcaaagcgaaggctatgtctgcgatggcgtcgccaccgctcacgaagccgcgctgtcgttagccagcaaccattacagtctggtggtgctcgacctgggcctgccggatgaagacggtctgcatttcctggcgcgtatgcgccgggagaaattcacccaaccggtgttaatcctcaccgcccgcgataccgtgggcgaccgcatcagcgggctggataccggcgctgacgattacctagtgaaacctttcgcgcttgaagagctcaacgcccgcattcgcgcgctgctgcgtcgccataataatcagggcgataatgagcttaccatcggcaacctgcgccttaatgttacccgccgtcaggtgtggctggccggcgaatcgctggagctgacgccaaaagagtatgccctgctctcgcgcctgatgatgaaggccggcagcccggtacatcgcgaaattctctacaatgatatctacagctgggataacgaaccggccaccaataccctcgaagtgcatatccataatctgcgggacaagattggtaaagcgcggatccgcaccgtccgcggctttggctacatgctggtgaataatacggagtcagaataacgttatggcactgtttgcgaccgaaacctggaccatgcgtcaccgcctgctgttgactatcggcgcgattctggtgatctgccagctgatcagcgtattttggctatggcatgaaagcaaagagcaaatccagctgctggttgccagcgccattgagggtcataacaatcaaaagcacgtcgaacatgaggtacgcgaggcggtcgccagcctgctggtgccaagcctgctgatcatcagtctggcgctgtatatcagcctggtggcggtgaagaaaatcacccgtccgctctcaaatctacaaaacgagctggaaagccggacgccggataatctgcaacccattattctgcaggagtcggtgccggaagtgaccgcagtgaccatggcgattaatcaactggtgtcgcgactgaccctgacgctcgaacgcgagcgtctgtttaccgccgacgtcgcccacgaactgcgtaccccccttgccgggctgcgcctgcatctggagctgctggcaaaggtacacggcgtcagcgttgatcctttaattcaacgtctcgatcagatgaccaacagcatttcgcagctgctacaactggcgcgcgtcgggcagtcgttttccgccgggagttaccagcaggtgcatttgcatgaagatgtggtggagcctctgcaggatgagttggcaacgatgcttgaagcgcgccagcagacgctggagatagaaagcggcgcaggcgaggatctcatttccggggatgcgacgctggcgcgggtgattttacgcaatctggtggagaatgcgcaccgctatagccccgtgggttcgaagattaagatctcggtaaaaccgggaaatacgccgattctggcggttgaggatgaaggacctggcgtcgatgaggccaagagcggcgagctgagtaaagcgtttgtccgcatggacagccgctatggcggaataggccttggtttaagcatcgtcacccgcatcgcgcaactgcacgatgcgcaattctttttacataaccgtcagcccggaccgggcgtccgcgcctgggtgctattcccgcgcagcgcgcgtcagaaggttaatacccattgatgtaagaaggcgaccacaatcacaaaggcggtcgcaatggccagatattcacggttggtcagtttttgcatggcgctatcctcattaaactgaggatagtgtcgctgaagaaaattaagccaacattaagatcctacgataatagcgtgacggcaattgcaaattgcgcattgccgtcatttttgcactgctcccctatcgcccttatgatgccgcaataaacagttcgcgtagctgatgcaattgatcgcggatctgcgcggcttcttcgaactcaagattctgggcatgctgcatcatttgcccttcaagctcgtggatcttctgctgcaacgctttcggcgtcagttcgacgctatcggcttccaccggagaacgggctttgccacggcctttggctttggtcttcgcgatgttctgacccagcgccagaatatcgaccactttcttattaagaccctgcggcacaataccgtgctcttcgttataacgctgctgcttctcgcggcggcgttcggtttcaccgatcgccttcgccatcgatggcgtaattttatcgccgtaaagaatcgccttaccgttcacgttacgcgccgcgcggccgatggtctggataagcgatcgctcggaacgcaggaagccctctttatcggcatcaagtatcgccaccagcgatacttccggcatatccagcccttcgcgcagcaggttgatacccaccagcacgtcgaactcgccaagacgcagatcgcgaataatttccatgcgctcgacggtatcgatatcagagtgcagatagcgcacccgttcgccgtgctcttccaggtattcggttaaatcttccgccatgcgtttggtcagcgtcgtcaccagtacacgctcattgatcgccgcacgggtacggatttctgataacagatcgtcgacctgcgtcgccaccggccgcacttcgataaccggatccagcaggcccgttgggcgaacgacctggtctaccacctcatcgccggatttttccagctcatagggacccggggtcgctgaaacgtagatggtctgcggcgccagcgcttcaaactcttcgaacttcatcggccggttatccagcgctgacggcagacgaaagccatattccaccagcgtctctttacgcgcccggtcgccgcggtacataccgccgatttgcgggatagtcacgtgcgattcatcgataaccagcaggccatccgccggcaggtagtcgaacagcgtcggcggcggctcgcccggcccgcgcccggagagaaagcgcgagtagttttcaatccccgagcagtagcccagctcgttcatcatttcgaggtcgaactgagtgcgctggctcagccgctgctcttcaagcagtttattgttcgccagcagtaccttgcggcggtcagccagctcgtctttgatctcttccatcgcctgtacgatacgctcgcgcggcgtaacgtagtgggtcttcggatagatggtatagcgtggaatggacgattcgacgtggccggtcagcggatcaaacagcgatagccgttcgacctcttcgtcaaacagttcaatacgcagcgcgatatcatcggattccgccgggaaaacatcgataacctcgccgcggacgcggaaagtgccgcgctggaaggcctgatcgttgcgggtgtattgcagttccgccagccgacgcaggatcgcccgctggtcgatcagcatgccggtggtcaggtgcagcatcatcttcagatacagatccggatcgccaagaccgtagatggcggaaaccgaagctaccaccaccacgtcgcgccgttcgagtaacgctttggtggccgacagacgcatctgctcaatgtgttcgttcaccgaggcgtctttttcgataaaggtatccgagctcggaacgtaggcttcaggctggtaataatcatagtaggagacaaaatactccaccgcattctcgggaaagaactctttcatctcgccatacagctgcgccgccagggttttgttcggtgccagcaccatcgtcgggcgctgtaaatcagcgataacattggcgatggtgaaggttttccccgaaccagttaccccaagcagggtctgatgcgcaaggccatcttccagcccctcttccaggcggcggatggcttcgggctgatcgccggaaggacggaatgcggagtgcagcttgaacggtttgctcatatttcaggacctgaagatgggattggccagcaggtgtttaattctacccttcagtttcatttttgccaataaataatactggatataaaaacagtaccgcattattgtatggtggcaaaaggacccgaggtagtcctgctgcgggcgtaaaatgcgcgctttgcggaataatccaccagcctgtgtggttatccccagaaacatttatcatttaacatttgtcaagcaaggtaatgaatcttttatggcagccggtgacacttttctgacagccattgcttttatttaacttgctgaaataaaagataatttatcaagagacgggtttcgcgccaatttgctcgcaggccgcgtactctctagcttaccgcaagttttctaactctaatacacaaggttatccacaggaatagtggataactgcctgcagcccgcgaggtctgccacccggcagaaaagtctcatcggaccaaagcccgcggctaaaaaaaattatcgaattttttttgataattatcagctaaagacggctggattttttgcgttttctggaccacatttcatcgtcctgtcaacaaaaaatagagccgtctcgcaggtttatgcggggttattgcagggggctcagatccaggtactgcgagagatccttacgctgcgacgcgtcggcaagccagggaatttcccccagcagcggcgctggcaatacccgcgttaaggtttgcagatattcgcgatggcgtttacccggcggctggatatcgttggcgatccagcccacgagcggcagcccggcttcgcgtaccgcctgggcagtgagcatcgcgtgattgatacaaccaagtttgacgccgaccactaaaatcaccggcaattgctcctgctgcgcccagtcggcgaaggtcagggtttccgagagcggcgtaaaccagccgcccgccccttccaccaatacccagtctgccaggcgctccagttcgcgtaagccgctggaaagcgtcgtcgcggcaatcggtcgcccttcatcggcgctaataatatgcggcgaggtcggttcggcaaaagtataagggttgacctgttcatagctcagcgccacccggctattacgctgcagggccagcgcatcttcattgcgtaacccttgtgcggtcaggtcgctaccggaagccaccggtttatagcctgcggtgttaaatcccagctgattcgccgcctgcagcagcgcgctgctggcgaccgttttaccgacttcagtatcggttccggtgacgaagaaacgtttagtcacgttcaatgactcctgtaaaaagatggtacgtcagcggacattggccctgctgttgcggccaggcaagctgcagttcgcgcagcttgccgcggctaagcggcgcagacgcccgcccctgatgtaagtgggtagcaccaatgccctttagcgagcgcatggcgcttaacgcgtcggcgaacggtaagctaatctgatgcacgacgccttcggcgcgcaggccgctcagcgccgcccttaccgcctgttcgctgagaaaacggttggcatggggatgttcgtcgaccgcccgccacgcttgattgagttccggtagcgatccggcgagcaacgtggtgaacgctacccgtccgccgggccgcaccacccggcacagttcgccgattgccgcccgtagatcgtcacaccactgcaccgccaggttactccatgccaggtcgaagcaggcatccggcagcggcagcgcttcgatatctccctgcagataatgctgcgcggcgccgttgcgttgcgcctgcgccagcatcccggcggagagatccagcgcggtaacttcgcttcctgcttcgcgccagtgccggctcatactgcccggcccgcagccggcatcgagcaccagggggaaatcacctttcgccaactggcgcagcagcaattcggcgctacggcgctgcagctcatcatgttgcgtatagccgctggccgcccgaccaaatgccgcggcgaccgcctgcttattcaccgtggccatacagcacctccagtaaacgcgcaatgtcctcggcctgatgagcggcagtaagagtcaggcgcagacgcgcgccaccgacgggaaccgtcggcgggcgaatggcggtagcccaacaaccggcctcgcgtaggctggatgccagagcaagcgctcgcgcgttatcgccgacgatcagcggttgaattgcgctcctggaatcggtcagccccagcgaaacatcgcccattcctgcgcggaactgacggatgcgggcggtcagggtttcccgccgctgctggccctcatcgctacgaatgacacgcagggccgcgctcagcgccaccgcctgcgcaggcggcatcgcggtgctgtagatgagatgacgggcaaactgcagcagataatcggccatcgattcaccacacagtaccgccgcgccgctcaccccaaacgccttgccgaaggtgaccaccagcagctccggacgaaccgcctgcatatgacagcttccgcgcccttcatcgcccatcaccccgattccgtgagcatcatcaaccagtaataatgccccggcggtacgggctgcggcctgaatatcagccagcggagcgctatcgccgtccatgctgaaaatcccttcggtaacgactaactgctggccgtccagcggtttcgccagcagttgagcgagctgtcgcgggtcattgtgggtaaagcggcgcagctgcgccgggctgaggcttgccgcctccagcagggaggcatggcccaggcgatcggctacaatgcgatcgtctttttccgccagcgcggcaatcaacgcctgattcgcggcaaagccggagataaacagcaacgcgcgcggatagcccagccagtcggcaagttcctcttccagcgcgcgatgcgcctcactatagccgctaacgtggcccgacccgccggaaccgacgccataacgttccgcccctgctgccaggcggcgataatcgcgccatgctggctcaggcccaggtagtcattactggagaagttgagccagcgctccccttcacgctccagccagcgtccggcgccgtggcttaccggcaggcggcggcgaaaagcctccgccgcccgccgttcgtccagcgcccgatcgattcgttgctgccagctcatagcgccgccgcgttgtagtattcctcagtgtcgggggtgagtaaggcctgctccaggcgctgctgctgctcattatcaccttccagcaccgcagtttgctgcgggttgatccccagcttgcggaacagctgcaggtctttatcttcttccgggttaggcgtcgtcagtagcttgcagccatagaaaatcgagttcgccccggccataaagcacatcgcctgggtctgctcgttcatctgctcgcgcccggcggagagacgcacgtaggaggttggcatcatgatgcgcgcaatggctatcgtgcggatgaaatcgaaagcgtcaacatcgtcgttatccgccagcggcgtacctttgaccttcaccagcatgttgatcggtacgctttccggcggcgttggtaaatttgccaactgcagcagcagcccggcgcgatcgttcacggtttcccccaacccgacaatgccgccggagcacactttaatcccggcatcgcgcactttatccagcgtatccagacgttcctgataggtacgggtggtgatgatgttgccgtaaaattccggcgaggtgtcgaggttatggttgtagtaatcaagccccgcgccagccaggcgctgcgcctggctatcggtaagggtgccgagcgtcatacaggactccagccccagcgccttgacgcctttcaccatctgctccagatacggcatatcgcggtcattggggttcttccacgctgcgcccatgcagaagcgggtcgagccggcgtttttcgcctgacgcgctgattccagcacctgctcgacttccatcaggcgctcggattcaagaccggttttgtagcgtgcgctttgcgggcaatatttacagtcttccggacaagcgccggttttaatcgacagcaatgtactaacctgcacctgacgcgggtcaaaatgttggcggtggatttgctgcgcttcgaataacagatcgatgagcggtttattaaataattccgtgacttgtgacattgtccagcgtgcgtggtgagccattggcctctccaaagggttttgttaatttgcggttcggtttataatcgtaaacctaaatgttttcaaaatggtttacaagtcgcttatgacactggacgatctcgccttcgatcggcgccacatctggcacccctacacctctatgacttcccccctgccggtctacccggtggtttccgcccacgggtgcgagctgtccctcgccggcggtgaacaactggttgacggcatgtcctcctggtgggcggcgatccacggctacaatcacccgcgcttgaatgcgacgatgaaagcgcagatcgaccagatgtcgcacgtgatgttcggcgggattacccatccgtcggcggtggcgctatgtcgccaactggtggcgatgacgccggaatcgctggagtgcgttttcctcgccgattccggttcggtggcggtagaagtggcgatgaaaatggcgctgcagtactggcaggctaagggccagccgcgccgtcgtttcctgaccttccgcaacggctaccacggcgacaccttcggcgcgatgtcggtctgcgatccgcagaattcgatgcacagcctgtggcagggctacctgccggataacctgtttgcccccgcgccgcaaagccgcttcgacggcgagtgggacgagatggatatggtgccgtttgcccgcctgatggccgcgcatcgccacgaaatcgccgcggtgatcctcgaaccggtagtccagggcgccggcgggatgcgcatgtaccatccggagtggctgaagcaggtgcgtaaaatgtgcgaccgggaagggattttgctgatcgccgatgagattgccaccggctttggccgtaccggcaaactgttcgcctgcgagcatgccggtatctccgccgatattctgtgtctgggtaaagcgctgaccggcggtaccatgaccctttccgccgccatcaccacccgaacagtagctgaaaccatcagcaatggcgaagctggctgctttatgcacggccccacctttatgggtaatccgctggcctgcgcggtggcaagcgaaagcctgcgcctgttggatagcggcgaatggcaacatcaggtggcggcgattgaagcccagctgaaggccgagctggctccggcgcgcgagtcagaatgggtcgccgacgtgcgcgtactcggcgcgattggcgtgattgaaacccgtcatccggtcaacatggccgctctacagcgctttttcgttgagcaagggtgtggatccgcccgtttggccggctgatttatctgatgccaccgtacatcatcagcccacaacagctgactcgcctgacccgtgcggtcaacgcggcggtacaagaggaaacattttttagcgaataaacagcggaattgcgccgtcgggaaagctacacttctttgttaatcagcgcattatcaatgaggatgaagcatgaaactgaccagtcacgatctgcaagacggcggcaagctgcctaatcgtcacgtattcaacggtatggggtacgatggcgataatctttcgccgcatctgatgtgggacgacatccccgcgggaaccaaaagctttgtcgtcacctgctacgacccggatgcgccgaccggttccggctggtggcactgggtggtagccaacctgcctgccgatacccgggttttgccacagggggccggttccggtcaggcggagctaccggaagaggccattcagacccgtaccgattttggtaaggcaggctacggcggcgcggcgccgccgaagggcgaaacccaccgctacatttttaccgtgcacgcgctggatatcgataagattgatgtcgatgccgaggcgagcggcgcgatggtcggctttaatgtccatttccattctctcgccagcgcttccatcaccgccctgttcagttaattatcccccggatagcggcttgcgccttatccgggctactcgctacgatcagtgccatttgtagccccggtaagcgcagcgccaccggggaaattgaccttactgttcagtggccacctgcaacgcggttttacgcacgcgtgcgtaccacaccaccgtcagcagccccagccagaccagcccggctaacagcgccacgcgcgtctcttccaccattcccagcacggcgatcaccagccccataaacagtagcgtcaacagcggaccaaccggccagaaggggatcgggaattcgatcttactgcgctcttcggccgacaaaccgcggcgcatcgagaaatgagaaagcaggatcatcaaccacacccagacggtggcgaacgccgccagcgaggcaatcaggacaaatacctgttccggcatcagatagttaagcaccaccgccaccagcagcgccacgcccatcaccacgaccgtcatccagggtacgccgttgctggcgatccgctggaagcacttcggcgcaagcccctctttcgacataccgtacatcatgcgcccggcaccaaaaatatcgctgttaatcgccgagatactggcgctaatcacgatgatattcagcacggtcgccgccgccgggatcccgaggccatcaaagatcagtacaaacgggctgccctgctcgccaaaactattccacgggaatatcgccatcagcaccgccagggtgcagacgtaaaacagaataatacgcagcggaatagtgttgatagcctgcgggatgaccttcttcgggttctgcgcttccgccgccgtgacgccgataatctctacaccgccgaaagcgaacatcacgatgccaagcgaagcgatgatcccctgccagccatttggcgcaaagccgccgtggctccacagattttccagcccggtggccggaaaactatggccaaagccaaagaagatgatccccgcgcccgccgccatcatggcgataatcgccaccactttaatcagcgacagccagaactccatctcgccgaacacccgcacgttgcacaggttcatcgcgccaataaagaagatgatactgaggatccagatccagcgcggcacatcgggataccacaaccccatatagataccgaatgcggtgacgtcagctagcgccacgatcaccatttcaaaggtgtaggtccagccggtaataaagccggccagcggcccaagatactggcgggcgtagctgccgaaggagccggaaaccggattgcgcaccgccatttcacccagcgcgcgcatgaccataaataccgccgcgccgccgatcagataggccagcagtaccgccggacccgccgccttaatagcggaggccgaaccgtagaacagcccggtgccgatagcggaaccgagcgcaataaaacgaatgtgtcgggcattcagcccgcgcagcagatgcggtttgtgttgttgttgcatatacaggtgtcctggtttttttatatgacgacaaatatgcgatgtaggacggccggggggatgacatcccccgacgcgggtacagagaacaacggtgattaattcaggccaggcaatacggcaggcagcagacgcgtcaggtgacgtgcggccaaaagctcggtggcattttcaatatcaggagcgaagaaacggtcttgggtataatgcggcacgcgttcgcgcagcagatgacgcgcctcttccagcagcggactggtggtcagcccttcgcgcatatccagcccctgcgccgccgccagccactcgacggccagcaccccgcgggtgttttccgccatcgcccacaggcgacgaccggcagccggcgccatcgagacgtggtcttcctggttcgcggaagttggcaggctgtcaacgctatgcgggtgcgacagcgctttgttttcactggctaaagccgccgccgtaacctgggctatcataaagccggagttgacgccgccatttttcacgaggaacggcggcagctgcgacatatggctgtccatcatcagcgcgatacgacgctcggagagcgagccgatctccgcgatcgccagcgcgatattatccgccgccatcgctaccggttcggcatggaagttaccgccggagatgacgtcattttcggcggcaaagaccagcgggttatcggagaccgcattcgcttcggctaacagtacttccgccgcctggcggatctgcgtcaggcaggcacccatcacctgcggctgacagcgtagagagtacggatcctgtaccttggcgcagttatggtgcgactgcgaaatcgcgctgtcatcggtcaacaggtggcgatacagcgccgccgcatcaatctgaccgcgctggccgcgcacctcgtgaatacgcgcatcgaacggacgacgcgaacccagcgccgcttcggtggttaacgccccgcaaacgaccgcggaggcgaacagatcttcggcttcgaacagaccgcgcagcgcaaaggccgtcgacgcctgggtgccgttcagcagcgccagaccttctttcgccgccagggtaatcggctccagccccgcctgacgtaacgcttccgtcgccggcagccattcgccgccgcgtacccgcgctttgccttcgccaagcagcgtcagcgacatatgcgccagcggcgcgaggtcgccggaggcgccgacggaacctttcgccgggatccacggcgtcacgccggcattgaccaggccaatcagcgcctggatcacgctcaggcggatcccggagaaaccgcgggacaggctgttaatcttcagcaccataatcaggcgcgccaggtcatcatccagcggctcgccaacgcccgccgcatgggatagcaccagcgaacgctgcaggttctccagatcttccgtcgagatacgggtctgcgccagcaggccaaaaccggtgttgataccgtaggcggtccgcccttcggcgaggatggcgttaacgcaggccacgctctcatcaattgccgcaaacgcgctgctatcaagggtaatgttcagcgggtggctgtaaacgtcgcggagctgcgacaggctcagttgccccggaattagcgttaaagatttcatttagcgttcccctgcgttgccgcaaccatcggaagattcagaccctgttccgccgcgcattcaatggcgatatcgtaacccgcatcggcatgacgcatcacgccggtcgccgggtcgttatgcaggacgcgagcgatacgcgccgccgcttcatcggtaccatcacagacgataaccataccggagtgctgcgagaagcccatgcctacgccgccgccgtggtgcagcgacacccaggtcgcgccgctggcggtgttaagcagtgcgttgagcaacggccagtcagataccgcatccgagccgtcgcgcatggcttcggtttcgcggttcgggctggcgacggagccggaatcaaggtgatcgcggccaatcacgatcggcgcggagacttcgccgctacgcaccatttcgttaaaagccagccccagcttctgccgccactccagacctacccagcagatacgcgccggcagtccctggaagctgatgcgctcgcgcgccatatccagccagtggtgcagatgcttatcatctttaatgatctctttcactttcgcgtcggtcttgtagatatcctgcggatcgccggacagcgctacccaacggaacgggccgataccccggcagaacagcgggcggatatacgccggcacgaagcccgggaaatcgaaggcgttgctgacgcccatttcctgcgccatctggcggatgttgttgccgtagtcgaaggtcggtacgcccatttcattgaaggccagcatcgcctgaacgtggtcggccatcgagcgtttcgccgccaggatagtgccttgcggatcggattcggctttctgctgatactcctcccagctccagcctttcggcagatagccgtgcagcgggtcgtgggcgctggtctggtcggtgaccatatccgggcgcacgccgcgtttcaccagctccggaacgatatccgcggcgttgccgcacagcgcgatggagatagcgcggccttcggcggtgtattttttgatgcgcgccagggcgtcatccagagaagtggcctgttcatcaacgtagcgggtacgcagacggaaatcgatgcggctctgctggcattcaatgttcagcgagcaggcgcctgccagcgtcgcggccagcggctgcgcgccgcccataccgcccagaccggcggttaatacccagcggcctttcaggctaccctgatagtgctgacgaccggcttcgacgaaggtttcgtaggtgccctgcacgatgccctggctaccgatgtagatccagctgccggcggtcatctggccgtacatcgccagccctttagcatccagttcgttgaagtgttcccaggtggcccagtgcgggaccaggttggagttagcgatcagcacgcgcggcgagttttcatgcgttttaaatacgccgaccggtttgccggactgcaccagcagggtctcgtcgctttccaggtttttcagcgccttcacgatagcgtcatagcattcccagttgcgcgcagcgcgaccaataccgccatagaccaccagctcatgcgggttttcggcgacatcgggatcgaggttgttcattaacatacgcagcggcgcttcggtcaaccagctcttggcggtaagcgtcgtgcctctcggggcacgtacgtccagctggcgatatttgctttgcgacatcggggtttctcctgacaattaacgttgtgtacgtagatacatatacttgtctatacaactctacgcaagccaggatttaacagaaatgatacaattttgttatattgcgtcagcaatcacgttttgctgacgccagggtaaattacgagctgaaatggccctgcaggcggtagcgcgcgccgggaaacagcaggcgagcgtgtgagacaatatgcgtcgtcgaccaggtgcggcggcgaataagcaggcagggatcgtgcggcatgatgcgcagcagcgcgcactcttctgacgtcgcctgcaccgcctcgacgatatgttcgccttcggttaacggcgcaatcagcgatagataatcatgcggcgtggtggtggtgtaatcctgtaatagatagtccggcaccaccgcggcattgacgcagcgatcttcgatttgtaccgggacgtcattttcaaaatgcaccatcagcgaatgaaagatacgcgtgccttcggcgacgttgagcgcctccgcctggataacatccgcttcggtctcctctaaaagcagcacctcgcagcggtgctggtgacggcgggaggcaatctcatcggcaatgctgcgcacttcaaacagcgccgactgccctttcggctcggcaacgaaggtaccgacgccctgtagcctcaccagcatgccttcatcggtcagctcgcgcagcgcgcggttgatggtcatgcggctgaagccgaactgggcgaccagttcagcctccgagggaattcggtcgtgcggacgccactcgccgcggtgaatcttttcgctgatcgcctgcttcaccttttcatagaaaggcgcgggcgcggaacgaggttgttgtgcaaacatggcctggctttccttatgcgtaataagcggagcggcgaaacgaaaataatagcgcggatcgctagcgccaccaatgggcgatttgccatgccagacgggccgccgcgcgggcgccctgtccgtcgatgtcaaattgcggattaaactcgaccaaatccaccgcctgtagcttaccgctgcggcacaacggctcaacgatccgcagtagggtcgccagcgacacgcccaacgccgctggtgcggaaaccgccggcatttcgcgcgccggtagcacgtcaagatcgatagtcagatacagacggtcgaattgcgcaatattgcgctcaagctccggcaacacacgagtttcgaaggctgtcagcacctccagatcttcaacgatagccacctggcggcgcgctgcttcatcccatagcgcctgggtgttcgccgcccggctaaccccgatgcaggtatagtgaaaacctcgctgctgcgcttcacactccagcgccaactggcggaacggcgtcccggaactggcgcattcggcaaagcgtaaatcaagatgcgcatcgagattaataatgcccactttttcgcccgggaaggcatccagtaccccagcgccgtgaccgaaagccgtctcgtggccgccgcccaggaccagcgtgcgtttgccggcgcgttgacaggccgccaccgccccacgcagcgcctgatgcgcggcttctaactgttcgccatcgacgctaatcgtgcccatatccacgcagcggtcatggccctgatggctggccatattggctaatgcccggcgtagcgtttccggaccatgcccggcgccggtacgccctttattacgccgtacgccttcgtcgcaggcaaagccgagcagcgcgatatcgccgggcatctcctgcggcgcgaagcgttccgcgcgggcgatggtctggaacaggcgcagcgcattgggcgcctccgcgctatcatcacgcccctgccaaaggttcgcgggggtagcttgccaaagcatcattgcagttctcctcgtaccacgcgcccccagagcggcgcgcgccccggctcatacaccatctcgaccggatgctctgcttcccagatggcgaaatttgcgacaaagcccgccgccagctgaccgtgactctcctgtcgccccagcgcccgcgcggcatggcgagtcaccccggcccatgcctcttccggggttaaaccaaactttacgcaggccatgttcatcgtcaggtgcagactggcgaaggggctggtgcccgggttgaaatcggtcgccaccgccatcggcacctggtacttgcgtagcagttccactggcggtttgcgggtttcattaaggaagtagaacgcaccgggtagcagggctgccacggtgccgctttcgcgcatcgccgccacgccctcttccgtcagatactcgatatggtcggcggaaagtccatgatagcggctcaccagttgtgcgccgcccagtgacgagagctgctcaacgtggccttttaccggaatgcccagcgcctgcgcggcctgaaatacgcgctcggtttgctgtggactgaagccgacgttttcacagaaaacgtcaacgctttcaaacagtccctcttgccacagcgtcggcaatatggtctcgcagaccagcgagatatagccgtcggcatcgccttgatattccggcggcgtggcgtgggcggagagcaacgtcgccgacagttccacgccgttgtcgtcggccagttgtcgggcgacccgcagcattttgcgttcgttttgcagatcgagaccgtagcctgatttaatctccagcgttgttaccccttcacgcagaagacgagcgagacgcggctgcgccagcgccattagttgggcttcgctgctttcgcgcgtggcgcgcacggtggagttaatgccgccgccgttggcgctgatggtttgatacgacacgccgttcagccgctgctcccactcctgcgcccggctgccgccaaaaatcaggtgagtgtggcagtcaatgagacccggcgtcagcagccggccttcgaggtcgatacgacgccccgccggggcgtcagcgtcgtcgacgatcgcctcgatacggccgttacgcaccagcagcgcatggcgctccagcaggccgtatggttgagaagaatcaggattcaaagtggcgagacgcgcgtttcgccagataacgagttcagaggtggcttcagtcatagcattcaacttgtcatgggttgtatagacatttattttcataacgctgctaatgtcaataaaagcgcgggtaaatgttatttttttgtgactaaagacgttccgtcagcgcttcgcgttgcgtaaagaagtgaagtttttgaactggcatcttcccgtttcgttcaagttagtataaaacagcaggttttaaaggacttataccctgtcacatacaaagggtatgtaacttcgcatattatcgcccggagcaacatgaacacatattccgtttcccgtctggcgctggcgctggccttcggcgtgacgctgtccgcctgtagctcgacgcctgccgatcaaaagccctcaacgcagactgcaccgggcaataccgcaaggccaattcttagcgccgatgaagcgaaaaacttcactcaagcggcctatttccagtcgctgacgccgaatgccgccgcgtggacgccatccgctatcagcctgccggcgcagcctgatttcatcgtcggcccggcgggtgcccagggcgtgacccacacgactattcaggccgcggtcgatgcggcgattgcgcgtcactccgcccgtcgcctgttcatcgccgttatgccaggtgaatatacgggtactgtttacgtgcctgccgcaccgggcgcgctgacgatttatggtaccggtgaaaaccctgccgacgtcaaaatcagcgaagcgattgattccgaaatggaccgcaatagctggcgtcatctggttaatccgggcggcaaatatatgccaggcaaacccgcatggtatatgttcgacagctgccagagcaaatccgccgccaccgttggcgtgatgtgttcagcagtcttctggtcgcaaaacaatggcctgcagctacagaacctgaccatcgccaacaatctcggcgatagcgtcgatgccggtactcaccaggcggtggcgttgcgcagcgatggcgaccaggtgcagatcaataaggtcaacatccttggccgccagaataccttctttgtgaccaatagcggcgtgcagaaccgtctgcaggataaccgtcagacccgcacgctggtgaccaatagctatattgaaggcgatgtggatatcgtttccggtcgcggtgcggtggtattcgataataccgatttccgcgtcgtcaattcgcgtacgcagaaagaagcttacgttttcacgccggcaacgctgaaaagcgtaacctacggcttcctggcgaccaacagccgcttcaccgcgtccggcgataacgtcgcgcagttgggccgcgcgctggacgtcgacggcaacagcaacggccaggtcgtgatccgcgatagcgtcatcaatgaaggcttcaacattgctcaaccgtgggcggcggcggtcggttctaaccgcgccttcagcggcaacgttggcgcgcaggatgacaaaggcaacccgcagcgtaaccttaacgacaacggcttcaaccgcatgtgggaatataacaaccgcggcgtgggcagctttgtggttgccgccccgaaacagtaatactaccggtccgcgctcaccgacacggtgagcgccctgccgcaggcgatagcttaagccttcgcctgcggcacccacaccagtttgtttaccgcaaaaccgagctcagcggccagggcaaggtactgctgtcgaatatgggagggaatatccggggtgcgcgaaagcagccataaatagtcgcggcctggaccgctcaccagcgcgtattggtagtcctcgtcgagcgcgatcacgttatatccgccatagaaggggccgaagaaagagactttcagcgctgccgtggtggaagcgccggtgaaataggctttgccttcgctttcgcgccagcgtttgttgcgcgggtcaaatcctctattgagtacgcgaatgccgccatcgtcacgcatactgtaggttgccgtcacctgctccagacctcgttcaaaacggttttccagacgcgcgacttcataccagcggcccagataacggctggcgtcaaagtggttgatcggtttaaccccttgaggcggcgtgggtgtcttacaggcgactaacgccagcgataccgctaccccggtcaaaattggccatagtttcatcgcatccccttcttttttcactttctcggcagacaagtataaccctgagcgaagcgtattcggcgtttttcggagagatttaccgtcttgcttgtacaagagtaaaaaaataaaaatcaaaaaaaaatcaaaaacataaacaaaatcacattaacatatcgctaatgtgtacaaattatttcgcagaaatttgtacaactttcctctgagcgtctatagttgacgggtagctcgattttacgcgcgcgctcgggtcagcactctgcgccaacgccgcggttattttgaggtggttcctgttttaccgttgcctgtccgcaatgttttggcgtaaacggtgtgcaaatcgtttacgccagcggcttttattgttcgcgtgggagattctgggttatgcacatcaaaaatacgattcccccgcagtttattactaactgcgcattgctgaaaaacatagaaaatagcttattacaggaaaataaaaccgttgacgaatttcaattaattagtgagattaatcaacggttacaaatagaaagtaatgaaatccttgccgatatctatttacaggcgctggatattctgcgctgtggtattcgccattaattcgtccatccgcttcgtggagaccaaaatgttcaataaacacacgcacatttgttccgaacgctatgacctgtggattgacaaccactttctgatgagtggtatcagccttattctgcgcacgctgccagaaagttgctttcgcaaaaaacatgttttcttcaccagcgatagctatttctcggtgttgcaacataaatataatcgtcgggaaacgatttttgttttattaaccgagggtaacgatcttaatttccttagcgaactaccaatgttacgcatccccgccagatcgacccctgctgaattaaaaacatttctcaatcaaccgacccgttattataaatcgcatacttctcctggcgaactgatacagtttaccgagcgagaaaagaaagtcattcagctcatcagtaatggcgaagccattgccagtattggtcgctcactaaacttgcatattaagacaatttatcaaatccgtttgaatctaataaaaaagcttggctgcagcggcaggaccgatttctttaatatcagccgtagcgaaacatttaagtcctggagtcaaatccatctgtgagcacgcgcgacgtaagcaaacagaaacctgcctcacttgcaaggcaggtttttttattcgttaccgtggaagtgaatactaaagccctgttcctgccagtggcccagcagctccagttgcagcggcgaggcggggcgcccggtccagacgaaaatatgttgtccaggaaacagctccgggcggggagattctaacggttccgccagcacgttaacatgccaaccgcgttgcgaaagacgccaggcttccagccataggccggtgcggtcttcaatcccccaccccaccagcagcgtctccttgccattttttttacgcgattccgctaaaaacagcgccacgcaatcaatcaatatgccatccaacatgctgctgatgaccattgaagtgttttgatcgagcttcagccgctggcgcaccggcgcgaacaggctatcaagcagggtgtcgacgggatgctgatgacttaatgcggtgattttggcgcggatttttgccggctgcatatagcgcaggatactcatcatctcttcctgcaactgtgcggattcgtcacgggcggcaggtagctggccttccagtagcgctttaaccttgcccactgaaacgccacgttctatccagcgcttaatttcttcgattcgctgaatatcttcttcatcaaactgacggtgcccgccttcgctacgctgcggtttcagcaaaccgtaacgccgctgccaggctcgaagggtgaccggattgattccgcaacgctcggctacttcaccgatactgtaaaaagccataagccgccttatctcaacctgatactttagcgcctaaactaacgaatttaggcatactgtacaactctcttttcctgtacagataaagatatcaggttgcagctcacagcgtgcgggaaaaaggatgaaagtatgtttacgctatccctggagggatcatattttccccggccaggcgatagccggcagaccacccagccgcgggctggcaaacagatttccctggaaatgagaaatacccgccgcctccagccacatccactcctccgcctgctcaacgccaaccaccgatacggcaatttccagcgagtggcagcatttaataatcgcctgcacgatagcctgacgcgggccgtcacgatggatgttgcggatcagctgttggtcaattttaattcgatccggttgatattgcgccagcagcgatagcccggcaaaaccggcgccaaagtgatcgatagcgacgcgtattcccgcccccttcaatttgcgtacggcatcggtaaactcatccattcgcgaaatcacttcacgctcggtgaattcaacaataatttgttccggaatcaaatcgttgcgctgaatttccgttagcaggaatggcaccgcatccgccactttcaccagcgtcatcggcagtagattgatggtcagcgtacgttcacgcaggcctaacttaccggcaatggccagcgcaacccgtttactttgcagatccgcgacgtaaatctcatcgcctgacaaaccggcaaaataggctgcgggcggttctccgtcaacggtacgcagcagcgcttcccaggagattatttcgcaggcaaaggggtcaaccaccggctgaaaagcaaaacagcacatatcagcgccgtcgatacagggtacggccggataaaacgtgctctcatcagcagtaaaatcccagctatcagctgacggaatttcataataattctctttttccgtcgcttcgacaaaggtacggaaaaaatgcagcgcccggtcgtcgtaagtcagctgatattttgtcgtccctttatccagcacgttctgtagtaccgcgtcgcgatcgtgttcccttaaatcaaacagctccatgccgaccttaccaaagcggcgagccggcgcgtaatcgcacagaagctccaccagattgtaatgacgcgggtccgcgcaaatatgccgatagatttgctgtacgttttcttccggtccctcaatgagttggaaaaaatgcgtaccgttaaaaagtaaaataccggtgacatccgcctgaccatttctctcgttagccgcagcaaccatcgactcgagcgatttgaatgagacatcgtcgcagatatggctgcgataaatgatggtggtgagcatagcggttccagatgagaggtataagcattcacagtagcagttactgttcgatacgtcttgcgaaacaagtatttatattaacaaaaattgaacacacaacgccggccggtcgcataatcttgtacaattcgtcacgcttaaaaccctcattgcaattttaaataaaataaaaaaacaacaaacttatcaataattttcaataaattatactccaatcacgatttattgcgcaacacgctatgtacaagttacaaattattgtataagtttactcacagttaacagatgagtgaaattaaaggagcgcatatgcagcagaatggttacattccagatacagcgaacgcgatagcccagtatttcaacaaagcatcgttaccttcccagcaggagacgctgggcgaaatcgtgatggacattctcaccgaagggcggcatttaaaccgcaaagcgctttgcaccaagttactgagccgtcttgacgtcgcacgagccccggaagaagaaaatcattatcaaacgttgattggcctgctgtttgagcgtcaggagtaaacgctgcctgtcggcctgcatctgacctggcttacaggaacaacgtggcatgcagagggacgatgatgaaaagcagtcaatcagatcggtttagcgatgagattattggcgaggcagttttatctcttcttaaaacaaaccggccaattaatattccgacgctgctagtcaaacttcggttaatgcaggcagcggaaacgaaccgccagcgaaggaatgcaattattgccgttatcgatgaaattagcgtcagactcacgacgcgcgacaatcacgcgccggtcattaaaaagattaacggccagtgggaaaacagagccgttgttgtggatagtaacgtcgaaccgacggggaaaaaaatacactgatccccgatcaagtttaataaacaagtgagaatatgatgagacagactatgcatcagcaatcagatatttacgcaggactgcaggatacagcgctctcagaatatttccgcagcgccggagataaattagtcgatgaatctgcggtaatgtcgctggcaatcgacagtatcctcagctcagatgggcatctgagcaataaggcgcttattttatggttgatcaatgcgctggaaaccaccgataacgtggttaccgcggatgtgattcgcaagacgctggaaattgtcgtcggctatacgatggatgatatttaaagctgtcagtccgaataaaaaaacctcgccggcgcgaggtttttttctatcaatagcaaattaatgcgcgttaaccactacccacatcgggccctgaccaacggcataacgccctttctcttttaacagcccctgctcgccggcaatttcatataccgcgatatgatgcgatttctgcccggcggcaatcaaatacttaccgctgtgatcgagattaaagccgcgcggttgcgcttcggtcggctggtagccctcaatagacagtacgctaccatcttcagaaacgctaaagatggtaataatgctggcggtacgatcgcaggcataaagatgacggccatccggcgtaatatggatatccgcagcccagcgcacgccggtgaaatctggcggcatcatatccagcgtctgtacgcactcaattttcccgtgcggatctttaagctcccacacgtcaacggagctgttcagttcgttcacgcagtagccgtactgctggttcggatggaacaccatgtgccgcggaccggcgccttcaacggtagtgacttccgccggctcctgcgcggccagatagccgtcgtcactcagattaaacaggcaaatacgatcctgcttcagcgccggtacccatagcgtgcggttgtccggtgaaatattggccgagtgacagccctccagcccctcgacgacggtgaccgtttcgcccggcaggccgtcaatcaatggcgtcacgctcacacagccctgattgtaggaagcgctgaaaacaaaacggccctgatggtcggtggagatatgcgtcgggctacccggcagcgcggcttcaccggcgaaagtcagcgcaccattatctggcgctatgcggtaagccaggacgcgaaactccggacgaacgccgacatagagatactctttgttcggacttaccaccatcggctgcacctggcccggggcatcaacaacctgaaccaatgtcagatttccctctgcattgaggctccagacgtgaatctgatggctctccgggctggcggtatatacggtttgtttcatgactactcctttcctcactgctcgtgaaactgctcgtggacatcgttatacatttcatccggcgcgcggcgcaacgatgaatggtatagacgtttttaacggtagatgctgaaaaatttgcccctgagacgaagccgtgtaccatcatggcagaccctttttcaccatttaccggaaccaacacatgacctcacgcgtgatcgccctcgatttagacggcaccttactgacctcgaaaaaaacgattcttccggcgtcgctcgatgcgctggctcgcgcccgggaggctggatatcaggtgatcgtcgtaaccggccgacatcacgtcgctatccatcctttttatcaggcactggctctcgatacacctgcaatttgttgtaatggtacctatttgtatgattatcatgcaaaaaaggttctcgaagccgatccgatgccggtggataaggctctcagcctcaccaacatgctcgccgaatacgatattcacggtctgatgtacgtcgatgacgccatgctttatgaacgtccgaccggccacgtgatccgcaccactaactgggcgcagtcgctgccggttgaacagcgcccggttttcacccaggtggattctctggcgcaggcggcgcgtgaagtacaagcggtatggaaattcgccctcaccgatgaaaatatcccgaaactacaggccttcgcgcagaccgtcggccagaatttgggcctggaatgtgaatggtcgtggcacgatcaggtggatatcgcccgcgccggcaacagcaaaggcaaacgtctggcgcagtgggtcgctgcgcaaggattatccatgcaggacgttatcgcctttggcgataactacaacgatctcagcatgttggaagccgtcgggaccggcgtggcgatgggcaacgcggtcgaggaggtcaaagcgcgggcaaaggtggtgattggtgaaaatgagaccaccagcatcgccgactttatcaatcgtaacctgctgtaatcaggccgcgatcgatacgctcttaatttgcgcatacagccactgacctagggtgatgcccaggtcatcccgcgcccacgggctaattcgcgcccatagcgttttgccgctgaccgtaagctgtacctcaatctggccgttggtttccacgcaaccaacgacctgcgcgcgcaggatattacggatactggtctgtcgcggatgctccagcaccagcgacacatccgacgcctgaatacgaatacgcgccgcttcgcccggctctcgcgccagctgattaacccatagttgctggtcgcccaacgccagcgcggtcatcgcatattgcggatgctgcgcgatcaccgagacgttaagcattgtgctctgctgctcctgcggcagccacggatgcatcacgctgctgctccagaccgtttcgagatcgccaaacgccttcacttttcctgcttccagcaccagcacgttatcggccaggtgctgaatttcatccagcgagtggctgacatacagcatcgggatatggatctcgcgcgccagccgctgtaaataggggagtaattcgcgctttcgcggaatatccagcgaggccagcggctcatccagcagcagcaattccggcgcggtcaacagggctcggccaatcgccacccgctgtttttccccgccggacaagctaccgggcagccgttcgagcaggtgttcaatgcccaacaacgccaccagcttatcaaattgcgcggccatgcttttggccatcccatatttcaggttaccgcgcactttatagtgcggaaacagccgcgcgtcctgaaaaacataaccgatacgccgtttctccggcgccaggcagatgcgctgtcgcgcgtcattgagcacccggccattgagcacaatgcgcccctgctgcggctgcgtcagcccgctgatagcattaatcaatgaggttttgcctgcgcctgagacgccgaaaatagcagtgatgccgctggcaggcagggtttcgtgcacttccaggcagtggttgcccaacgtctggctaaaatcgagctccagcatagttattttcccatccgcttacggctaaggcgcgccagccattcagacaccagcagcgataccagcgccagaacaatagagatgatgcataaccgcgcggcagcaccttcgctgccgggcgtttgaatcagggtatacatcgcggaaggaatggtgcgcgtttcgccaggaatgtttgagacaaaggtgatcgtcgcgccaaactcccccagcgaacgggcgaaggccagcaccgtaccgacaataatgcccggcagggtcaacggcagcgtgatggtgaaaaatacccgccagcgattagcccccagggtgcgcgccgcctgttcaagcttcacgtccaccccttcaagcgcgaggcgtatcgcccgcaccatcagcggaaatgacatcaccgccgccgccagcaccgcccccgccagctgaaggcgaaggtcagaccaaaccagtcgtataaccaactaccgataaagccgcgtcgccccatggaaatcagcaacagatagccaaccaccaccggcggcagcaccagcggtaaatgtataatgctatcgagtaacgctttgccgggaaaatggcggcgcaccagcagccaggcgaaaaagatcccaaaaggtaagctgcaaaccaccgccagggatgaaactttcaggctcagcagtaccgcctgccattcgggatcgcttaaaatcattgctgtgtggtgaatccgtaacgtttaaagatagccgaggcttccgggcctttaaggtagtcataaaacgcggttacggtagcatttttatgcccatcaacgatagccagcggatactcgacttttttgtgcgaatcctccgggaaggtgcccaccactttgacccccttgctggcgacggcatcagagccgtagacgatgcccaacggcgcttcgttgcgctccaccagcgccagcgcgccgcgcacgtcttctgccggcgcgagcttcggcgacagcgtctcccaggcccccagtttttgcagcgcttcttttgcgtagatccctgccggtacgtggtccggatcgccgaccgccagacgcccgccttgcagcaggctgacccagtcggttttagcattaatggtgatatcgccgcgatcgctggctttcggcgcgaccaccaccaggctattgcccagcagcgtggtgcgggttgccgtatcgattgattttttgtctacggcatagtccatccatttctggtccgcagaaataaacagatcggcgggcgcgccggcttcaatctggcgcgccagcgtggaggaagaagcaaaggaagagaccacttcaacgtggtgctcatttttataggcttgcgcaatatcctgcatagcgttggttaacgacgccgcggcaaagacggtaactttaccatcctgcgccagcgcataaccagaaacgcagagcgttaaagccgctccggtcagaaaacgcgaccattgacctgccattggaaactcctgtgtgttcgttatgtagcaaataatataacgactatactcaggatttcccagcgcgatttaggggtaatcaggttaagtacaaaagaaaacgcccggcgagccgggcgttggggaatcagtgattttgctggctgctgtctttatgaccgacgccggagaaaatgttgaacacttcgccgagaccgtaaatcagaccgaggatgatcgccatcaccacaggtaccatgacgacagcaaataccagacttttcaacagctctaacatggttggctccagatagtacgaatacttcattgtaaccatttcagccggaaaaacacgccccatttgtgcggtgccttgccgccgtcgcggcagatgcctgttgcaagatgggtgctatcgttcacaatacgctttttacgtcaggaattgattatgcaggccgaaattcttcttacgcttaagcttcagcagcgcctgttcgccgatccccgccggatagccttactcaagcagattgaccggacaggctcaattagccagggggcgaagaacgccggcatcagctataaaagcgcatgggatgcgatcaacgaaatgaaccagcttagcgaacaatcgctggtcgaccgcgccaccggcggcaaaggcggcggcggcgcggtgctgacccgctatggccagcggttgattcagttatacgatctgttggcgcagattcaacaaaaagccttcgacgtactaagcgacgatgacgccctgcccctcgacagcttgctggcggcgatttcccgcttctcgttacaaaccagcgcccgcaaccagtggttcggcaccatcaccggtcgcgaccaccagcaggtacagcaacatgtcgacgtgctgctggcggacggccaaacccgttttaaagtcgccattaccgctcaaagcgccgaccgcctcgggctcgatgaaggccaggaagtgctggtgttgctgaaagcgccgtgggtcggcatcacgcttgaccacgctgtggcgcagcaggcggacaaccagcttaccgggcgcatcagccacattgaacgcggctcggatcggtgcgaagtcatcatggcgttgccggatgggcaaaacctgtgcgccacgctgtcaacggcgcaaaccaacggtttgcaggaaggcgcgcaggcgatcgcttacttcaatgccgatcgcatcattctggcaaccttatgctaatggcattgactttattgccgtgaagacgtatccatgaagcacaacgctgcaaaaagtgggatacacaatgtcatcattgcaaatttcgcaaggcacgtttcgccttagcgatataaaaaccttacatatcgatcgcctcacgctgcgcgctggcgaaagctgggctttcgtcggtagcaacggtagcggtaaatcggcgctggccagagcgctggctggcgaactgattctgctaaacgggcagcgcgaaagcgcatttcagcgtaccactcgcctctccttcgaacagttgcagaaactggtcagcgacgagtggcaacgcaacaatactgatatgctcagtcccggcgaagaagataccggtcgcaccaccgcggaaatcatcgaagatgaaagacgcgacccggaacgctgtgcccggctggcggagcagttcggtattagccacctgctgacgcggcggtttaaatatctgtcgacgggcgaaacccgcaaaacgctcctctgccaggcgctgatgagcgaccccgatctgctgatcctcgacgaaccgtttgatggcctggacgtcgcttcgcgccaacagttggccgacctgctggccagcctgcatcaggcaggcatcaccctggtactggtactcaaccgcttcgatgagattccagaattcattgaatatgccggcgtgctggcggattgcacgctgagcgaaaccggcaagaaacaggcgttattacagcaggcgctggttgcccaactggcgcatagcgaaaaactcgccggtatgacgctaccagaaccggatgcccccgccgcacggcacgacttagtggagaacgctccacttatcgtccttaacgacggcacggtgtcgtataacgataaagcgatcatcaaccagctaagctggacggtgaaccccggcgaacactggcagattgtcggccccaacggcgcgggcaaatccacattgctgagcctgatcaccggcgaccatccacagggttacagcaacgacctgacgttgtttggccgccgtcgcggcagcggcgagaccatctgggatatcaaaaaacatattggctatgtcagcagcagcctgcatctggaataccgcgtcagcactaacgtgcgtaacgtgatcctttccggctactttgattcgataggcatttatcaggcggtctctgataagcagcacaagctggtccagcactggctggatattctcggcattgataaacgcaccgccgacgcgccgttccatagtttgtcgtgggggcagcagcggctggcgctgatcgttcgcgcgctggttaaacatccgacgctgctgatactcgatgaaccgttacagggactggatccgctaaatcgtcaactggtacgtcgttttgttgatgttttaattggcgaaggggccacgcaactgctgtttgtatcgcatcacgccgaagacgcccctgactgcattacccaccgcctggagttcattcgtagtggagacggttacacttaccgcctcggtccgctggcagaatagcgctatactggggtctgcggatccctgtattttttcagagaaataaccaaaacccacaacaaccaactgttttataagcaatttaataaaaccagtcttaatagaccatcaagtgtaaacgattccactattttagcctgtgtcacacttttcccttctttggtatgctatcttcttctcacacgataagcctattggagcgaatcatgaaagtactggtcacaggtggtagcggttacattggaagtcatacttgcgtacaactgctgctgcagggacatgatgtgattattctcgacaatctctgcaacagtaaacgcagcgtattgccggtcattgaacgtctcggcggcaagaaagccacctttgtcgaaggcgatattcgaaatgaagcgctgatgacggaaattctgcacgatcacgccatcgaagccgtgatccatttcgccggcctgaaagccgtcggcgagtccgtcgccaagccgctggaatattacgacaataacgtcaccggtacacttaaattagtttccgctatgcgcgcagccggcgttaaaaactttattttcagctcctccgcgaccgtctacggcgaccagccgaagatcccttatgttgaaagcttcccgaccggtacccgcaaagcccctacggtaaaagcaaactgatggttgagcagatcctcgccgatctgcaaaaagcccagccggactggagcatcgcgctgctgcgctacttcaacccggtcggcgcgcatccatcaggcgatatgggcgaagatccgcagggtattccaaacaacctgatgccttatatcgcgcaggttgccgttggccgtcgcgaatcactggcgattttcggtaacgactatccgaccgaagacggcaccggcgtacgcgactacatccacgtgatggacctcgccgacggtcacgtcgccgccatggaaaaactggcgaataaagccggcgttcatatctacaaccttggcgctggcgtcggcagcagcgtgctggacgtggtcaacgccttcagcaaagcctgcggtaaaccgattaattatcatttcgcgccgcgccgcgatggcgatctcccggcctactgggctgacgccgccaaagccgaccgcgagctgaactggcgcgtgacgcgcaaccttgacgaaatggcgcaggacacctggcactggcagtcccgtcatccgcagggttatccggactaatagcctaaaggtaaggctctaaggaaataccatgacgcaatttaaccccgtcgaccatccgcatcgtcgttataacccgttaaccgggcagtggattctggtttcaccgcatcgcgccaagcgcccctggcaaggggcgcaggagacgccggcaaaacaaacgttgcccgcgcacgatgcggattgtttcttgtgcccgggcaatacccgcgtcaccggcgacactaacccgaattacaccggcacctacgtgtttaccaacgactttgcggcattgatgaccgatacgccgaaagctccggagagcgacgatccgctaatgcgctgtcaaagcgcgcgcggcaccagtcgggttatctgcttctcgccagaccacagcaaaacgctgccggaactgagcattgaagcactggaaggcgtggttaaaacgtggcaagagcagaccgcggaccttgggaaaagttatccctgggtccaggtcttcgaaaataaaggggcggcgatgggctgctccaacccgcatcctcacggccagatttgggccaatagctttctgcctaatgaagcggaacgtgaagatcgtctgcaaaggaaatatttcgctgagcagggttcaccgatgctggtggattatgtgcaacgtgaactggccgacggcagccgtaccgttgtagaaaccgaacactggctggccgtggtcccgtattgggcggcctggccatttgagacgctgctgctgccaaaagcgcacgtccagcgtttgaccgatttaaccgcagcccagcgccatgacctggcgctggcgctgaaaaagctgaccagccgttacgacaacctgttccagacctccttcccctactccatgggctggcacggcgcgccgtttaataatgaagataatcaacactggcagctgcacgctcacttttacccgccgctgttgcgctccgccacggtgcgcaaatttatggtcggttacgaaatgctagccgaaacccagcgcgatctcacggcggaacaagccgccgaaaagttacgtgccgttagcgatatccattttcgtgaatcaggagttgaacaatgagtctgaaagagaacacccaggcgctgtttgctgaacagtttggctaccctgccagtcacgtcattcaggcgccgggccgcgtcaacctgattggcgaacataccgattacaacgatggtttcgtgctgccgtgcgccatagactatcaaaccgttgtcagctgcgcgccgcgttccgaccgtatcgtgcgggtcattgccgccgattatgacaaccagcgcgacgagttttccatcgatgcgcctatcgttagccacgacacccaacagtggtccaattacgtacgcggcgtggtcaaacatctgcagaagcgtaataaccacttcggcggcgccgatctggtcatcagcggcaacgtaccgcagggcgcgggtttaagctcctcggcttcgctggaagtcgccgtcggcaccgtgttccagcagttgtatcatctgccgctcgacggcgcgcaaatcgctcttaacggccaggaagcggaaaaccagttcgtcggctgtaattgcggcattatggaccagcttatttcggcgctgggtaaaaaagatcatgcgctgctgattgactgccgcacccttggcaccaaagcggtgtcgatgccgaaaggcgtcgcggtggtaattatcaacagcaactttaaacgcacgctggtcggcagcgaatacaacacccgccgcgaacagtgtgaaaccggcgcgcgtttcttccagcagcccgctctacgtgacgttgagcttgcgcagtttaatgccgtggcccacgagctggacccgattgtggcgaaacgcgtgcgtcatgtgttaaccgaaaacgcccgtaccgtcgaagcggcgagcgcgctggcaaacggcaacctgcagcgcatgggccaactgatggcggagtctcacgcctccatgcgcgatgattttgaaatcaccgtaccgcaaattgatacgctggttgagattgtcaaagaggttatcggcgaccagggcggcgtgcgcatgaccggcggcggctttggcggctgcatcgttgccctgatgccggaagcactggttgaaaaagtacagcaggcggtagccgctcagtatgaagcgaaaaccggcattaaagagactttttacgtctgcaaaccatcccagggagccggccaatgctaacgccaactcgcgaactcgcgcccgacggacagccgtggaacgtgataacgctgcgtaataacgctgggatgacggtaaccgtgatggactggggcgcgacgctactctccgcgcaagtgccccttgccgatggcagcctgcgcgaagcgttactcggctgcgccacgccgcagcaatatcgccagcaggcggcatttctgggagcgtccgtcggccgctacgctaaccgtatcgccaacagcagcttcacgctcgatggcaaaatcgtgaatttaaccccgtcgaacgaggccggccaccagctccacggcgggccggacggcttcgacaagcgccgctggcaaattgtcagccacgacgacagccaggtgctatttgcgctcgactccgccgatggcgatcagggtttcccgggccatctgcaggcaaccgcgcgctatcgcctgactgacgataatcgtatcgccattgagtaccgcgccaccgttgataagccctgcccggtcaatatgactaaccatgtctattttaacctcgacggcgtgcagggcgacgtgcgccaccaccgcctgcagatcctggccgaccagtatctgccggtggagagcgacggtattccgtatggcgatttgcgcgacgtggagtacaccagttttgatttccgcgcgccgaaggtgcttgccggagagtttcttgctgatgctgaccagcaaaaagtgaaaggttacgatcacgcctttctgctgcaggccaaaggcgacgcccgccagccggcggcgcatgtctggtcgcaggatgaaaagctacagctgacggtgtatacctcggccccggcgctgcagttttattccggtaactatctcggcggcacgccatcgcgcggcagtcaaccttacggcgactggcaagggctggcgctggagagcgagttcctgccggactcccccaatcatccgcactggccacagccagattgcgtattacggcccggcgccgagtacgttagcctgacggaatatcagtttatcgccagataacaccataaccctccctgcggagggttttttttcgcctttttgctgtaatttgcaccgctaaaagacaaaaagctaacctgtgttttacaagcatcttacactgcgtcactattttcgctatggttagggataagcattgccgtgaggcaaattacggcaatataatgagaatagttatcaatcaataaacacatacaccacagtagtcgggttgcgtgtaggaggattaagagaatggctgtaactaagctggtactagttcgtcacggcgagagccaatggaacaacgaaaaccgtttcaccggttggtacgacgttgacctgtctgaaaaaggcgttagcgaagcgaaagcggcgggtaaactgctgaaggaagaaggcttcagctttgattttgcttatacctccgtgctgaaacgtgccatccacaccctgtggaacgtgctggacgaactggatcaggcctggctgccggttgagaaatcctggaaactgaacgaacgtcattacggcgcgctgcagggtctgaacaaagcggagaccgctgaaaagtatggcgacgagcaggttaaacagtggcgtcgcggctttgccgtcaccccgccggaactgaccaaagatgacgaacgttatccgggccacgatccgcgttacgcgaagctgaccgatgcggaattgccgaccaccgagagcctggcgctgaccattgaccgcgtcgtaccttactggaacgaaaccattctgccgcgcttgaaaagcggcgagcgcgtcattatcgccgctcacggtaactccctgcgtgcgctggtgaaatacctcgacaacatgggcgaagacgaaatcctcgaactgaacatcccgaccggcgtaccgctggtgtatgaattcgatgaaaacttcaaaccgatcaagcactactatctgggcaatgctgacgaaatcgctgcgaaagccgcggccgtcgccaaccagggtaaagcgaagtaatacgtaacggaattatttcggcaacaaaaaagcgtggaattttccacgcttttttatttttagctattgctggcgcaacacgaacgcagcaagcgttggcaaagcactggttagccgcgacgcgctttaaccgcatccgccagctggcgcaggatggtttcggtatcttcccagccgatgcaggcgtcggtcacgctcttgccgtaggtcagcggttcgccgctttccaggctctgattgccttccaccaggtggctttcaatcatcacgcccataatcgcgttttcaccaccggcaatctgctggcaaacgtcggcgccgacttccatctgctttttaaactgcttgctggagttagcgtggctgaagtcgatcatgatttgcgccggcagaccggcttttgccagacccactttcacttcggcaacgtgctgagcgctgtagttcggctctttgccgccgcgcagaatgatatgacaatcgctgttgccgctggtgttcacaatagcggaatggccccacttcgttaccgataagaaacagtggggcgcgccagcagcgttgatcgcatcgatagcgaccttgatggtgccatcggtgccatttttgaagccaaccgggcacgagaggccggaagagagttcacggtgcacctgggattcagtggtacgcgcgccaattgcgccccagctcatcaggtccgccacatattgcggggtgatcatgtcaaggaactcgcccgccgctggcaaaccgctgtcgttgatttccagcagcagtttacgcgcgatacgcagcccgtcgttgatgcggaagctgttatccatatgcggatcgttaattagccccttccaaccgacggtggtgcgcggtttttcaaaatagacgcgcataacgatttccagctcgcctttgagcgcttcacgcagcatcagcagacggctggcatactctttcgccgcggcagggtcgtgaatagagcacggaccaattaccaccagcagacgatcgtcgttgcctttgaggatgttgtgaatcgctttgcgagcatgtgcaacggtattagcagcattttcggtagcggggaatttttccaggagcgcaacgggaggtaataattcgttgatctctttaatgcgtaaatcgtcgttctgataattcatcttctttccaggcgttgccatacttatacaatgaaatgcaatccttccaatctatctcttcggtcaaaaagtgtaaacgtcattttacactgacgatggaataatcctggaattagggaaaaatacgccataaagtagcgaaatcctgccagccaactacaatttttaactgcaacatccaattaaatgtttatttttagtattatattttaaatcctcacgctaaggcggagtgttaaaccatagcaccgcagatccctggcacatctatgttggccgcgtttagccaacaaatcgactaagcaggagtatccgatgaatatgaataaactcacagccctacttctcaccgccaccttaagcctggccagcggcgccgcgctggccgccgatagcggcgcgcaatcgaacaacggtcaggccaattccgccgctgatgcgggacaggttgcgcccgatgcccgtgaaaacgtggcgcctaataaggtggataacgacaaaattaactccggcggcaccatgcttcaccctgatggttcgaccatgaatcatgacgggatgtcgagcgacgaggtccataaaaacagcatgtgcaaagatggacgttgtccggatacggataaaaaagttgaaagcggtaatggcatgaacagtgatgccagcaaaacagatggtaccacgcagtaattgaaacgggtgagataagggatcgaggtggcaacgctcaccttgatccctttgttcgctgaatttcggtaagatgtcatagttgtaataatgataactattaagggatgacatcatggcgcatgcacattcaccgactcctgctggcgaaaacagtaacgccaaccggctgctttgggctttcatcgtaaccgccggttttatgattattgaggccatcggcggcgtcatttccggttccctggccctgctggccgatgccggacatatgctcaccgactccgccgccctcctgttcgctctgctggcggtacgcttcgccagccggccgccaaatagtcgccatacctttggctggctgcgtttaaccactctcgccgccttcgtcaacgctatcgccctggtggtcattacgattttcatcttctgggaagcggtacagcgttttaaccatccgcagccggtggccggaaaaaccatgatggtcatcgccgtcgccgggctgttggccaatatcctcgccttctggatcctgcaccgcggcagcgccgaaagtaatcttaacgtccgcgcggcggcactgcatgtgctgggagatctattgggttccgtcggcgccatcgtggccgctatcgtcattttgatgaccggctggacgccgattgacccgatcctctctgtgctggtgtcgtgtttagtactgcgcagcgcctggcgactgttgcaggagagtatgaatgagctgctggaaggggcgccgcgctcgctggatgtcgaagcattaaagcgcgatctacgccgctctattccagaagtccgcgacgttcatcacgttcacgtctggctggtgggggaaaaaccggtgatgacgctgcatgtacaggtcgtgccgccacacgatcacgatgcgctacttgatagcatccagcattttattgagcataaatatgaaattgagcatgtgacggtacagatggagtaccgcccctgcagcggcccggaatgccacctgaatctggcgcattccggacatgagcatcatcaccatcattaacgtgaaagcgcgtgagaaccccgctcacgcgcgctgttaatccacatccggctaccgttcagagcaatgaacgtgagcagcaaatactccagcgacatcgcgtatacgccctgtagagcgaaaatcaccacgctgatgacgttgatgatcacccacagcagccagttttcaacgtatttacgcgtcatcaataccatcgcggcaatcgacagtaccatcatgcaggaatcccagaatgggaaagcatccggttccaacgtcggcatcgccacccgcagcccgagcatttgcatcaggttgacagcaatgcgggtcaggaaggcaaataccgggttaataaacaccgtcatcaggccgatagccactacgcagcccaccagccaggccagcgcttttggcaacggcagccagcgaattttcagttccgcttcgttatcgctggtctgccttgaccacgcgtaccaaccgtaaacgttcgccgcgaagaaaaacagctgcagcagcaggctggcgtacaactggatctggaagaagatgatcgcaaaaagcgtcacgttcaccaggccgaaggcatagttgctaatcttttccaggctcgccagccagatgcacaacaggccggcgatggtgcccaccgcctcaatccacgacagatcgtagccaccggcgccgatgggtatatgcactaaaatattctgcgtactgaaaaaatccattttatcccctaagcgtaacgcgacgcggtaatgagttatccccgtagtgtagccgcaaattccagcatacggttaagaggaattaatgccccggcacgcagtttggcgtcaacgtgaatttcgtgttcaacgccgccctgctctaacccttccgctatcgttttcaggccgttcatcgccatccatgggcaatgggcacagctgcgacaggttgcgccctcacctgccgttggcgcttccagcagatctttttccggtaccgcctgctgcattttatagaagatcccgcgatcggtcgccacgataagctgacgctgcggcaggcttttcgccgaggcaattaattggctggttgagcctaccgcatccgccatgtcgacaatcgcctgcggtgattccggatgcaccaggatcgccgcgtcggggtagagccctttcatacgcgccagcgcctgggttttaaattcatcatggacgatgcaggcgccctgccagcacagcacgtcggccccggtctggcgctgtacatagcgaccaagatggcggtccggcgcccaaagtatcttttgcccgaggctatcgagatgttcaatcaactccaccgcgatgctggaagtcaccacccagtcggcgcgcgcttttaccaccgctgacgtattggcatagaccaccacggtgcgatccgggtgagcatcgcaaaacgcgttaaattcatcaatgggacagccaagatccagagaacactccgcattcagcgtcggcatcagaatggtcttttccggactaagaattttggccgtttcgcccataaaacgcaccccggcaaccagcagcgtggaggccggatgacgcgcgccaaaacgcgccatttccagcgagtcggcaatacagccgccggtctcttcggccagttgctgaatttcaggatcggtgtagtaatgcgccaccatcacggcgtcgcgttcacgcagcaggcgtttaattttctcgcggtaaaacgccttttcgtcacggttcaacggttgtggttttggcgggaaaggataaatcgccgtttcaggatcaaacattacgctcatcatacaatctcgttttactggcttaactttgaaaccgtaaatatagctttgtttcgccttaatacggtcactatgttttatatgctaaacaagatagccgatcgcaagcgaaatgtcgtgatgaattttgtattccccggggacgatgctgcgcatcttcccgggctaccggttcgtgcgctatggagtcacggtaagcgtagtgcgaacatggagatgattgtggagaatgacgcatagcaaaaaggcgcctttagggcgcctttttacattggtgggtcgtgcaggatgactcagcttcgcctcgccctacgggccgttgctaacgcaacgttatccttcacgttcaacatcaaagttcaatgttgaatggtgggtcgtgcaggattcgaacctgcgaccaattgattaaaagtcaactgctctaccaactgagctaacgacccttgcgggattttactgctgtaatcattcaggatggtgggtcgtgcaggattcgaacctgcgaccaattgattaaaagtcaactgctctaccaactgagctaacgaccctaagggtgttccctgaaagattttgtactcggcaccatcattttagatggtgggtcgtgcaggattcgaacctgcgaccaattgattaaaagtcaactgctctaccaactgagctaacgacccgagtggtgggtgatgacgggatcgaaccgccgaccccctccttgtaagggaggtgctctcccagctgagctaatcacccgaaactgcgctggatactacaattcaaactaattagtggtgggtcgtgcaggattcgaacctgcgaccaattgattaaaagtcaactgctctaccaactgagctaacgacccggtggtgggtgatgacgggatcgaaccgccgaccccctccttgtaagggaggtgctctcccagctgagctaatcacccgatactacgctggatactacaattcaaactaattagtggtgggtcgtgcaggattcgaacctgcgaccaattgattaaaagtcaactgctctaccaactgagctaacgacccactctggcgtcgctttgggcttgttcgatatcccttggcaacggcggcatatattactgatttcagatttcagcgcaactaaaatttcgataaagatcacttaactgcttgggtttcgtgcgacaagaccagaaataacgcgatttctggtcatgccataatcaacccagggcgttaagacgtttttgcgcttgtttcgcaccatcggtgccagggaatttgctgactacctgctggtaaaccgctttcgctttcgcggtgtcgcctttgtcctgcatgatgacgccgactttaaacatcgcatccggcgctttcggggatttcggatagtttttcaccaccgaggcaaaataatatgccgcatcgtcttttttccccttattgtagttcaactgtccgagccagtagttggcgttcggctgataagttgaatccgggtacttcttgacgaagttctgaaacgccaccattgcgtcatcctggcgggacgaatctttaaccagcgcaatagccgtgttgtaatcggtgttggcatccccggtcatcgcaggcgccccggaagaagccgctggcgccgtactggcggcagccgagctttgatcaccggaagacgacggagcctgcgcctgcgcgcctgccgctgctgctccgccaccgctcgtcagcccgtcgatctgttgcagaatctgcttctggcgttcgacaatctgattgagctgatactgattttcctgaatctgaccgcgcagggaatcaatatcgctttggttatcggagagttgttgctggagttgggttaaaagctggctgtgagcattggaaatacgctcaagttgagtgacgcggtcttcgaccgagcctgagccgacactactgattggcgcctgagcaaaagcggcccaggggccgctatgccaaccagtaacgacagactcaataaatgatgtctgaagttactgctcatgcaattctcttagtaaaccagtacggcgcgacggtttttggcatatgccgcttcgtcatgacccagtactgcaggtttttctttaccgtaagaaacgatggaaatctggtcagcagaaacacctttgccctgcagatacatcttaacggcgttagcacgacgctcacccagagcgatgttgtattccggagtaccgcgctcatccgcgtgaccttctacggtcactttgtaggacgggttgctacgcaggaagttagcgtgcgcatccagcattgcagcgaagtcagaacggatatcgtacttgtccagatcgaagtaaacgatgttgttctgctgcagctgctgcatctgcagacgcgcttgttcttcggaagacatgttgccgccgttaccgttagcgtccataccagtgccggcacccagcatgccttcaccgctctggtcgttgctggcgttcttgttggaagaacacgccgcgattgccataaccggcagagcgatcatcagccctttcagcactttgttcagttgcatttctttgattcctttaataatcaattatttattatcacagatacggcgaccaggcagggaattttacctgtccatcagttgccggaagacgcgctttgaaacgcccatctgtagaaaccagattcagcacggatcccatcccctgagaagagctgtagattaccatagtgccgttaggtgccagacttggcgtttcatctaaaaacgttgatgacagaacctgtacaccacccgcttccagatcttgcttagcaatgtgttgctggccgttggccgagcttaccattaccataattttaccatcagcgctgacgtcagcatcctggttctgcgaaccttcccaggtaatacgctgcggcgtaccgccgttaatgttgactttatacacctgaggacggccagcctggtcggaagtaaacgccaggttctggctatccgggaaccagctcggttcggtgttattgctgcgaccgttagtcacctgacgaatctggccggagccgaggtccatcacgtacagattcaggctaccggttttcgacagtgcgaatgccagtttgctgccatctggcgagaaggccggcgcgccgttgtgctgcgggaaggaggcaatctgacggactgcgccattcgccagcgtctggactaccagcgcggagcggccgctttcaaaggtcacataggccagtttagaaccgtccggagaccatgccggcgacatcagcggctgcgatgaacggtgaaccaggaactggttgtagccatcgtagtcagagacgcgcagctcatacgggaactgaccgccgttggtgcgaaccacgtaagcgatacgggtacggaaagcgcctttaattccggtcagcttttcgaataccgcgtcactggcagtatgtccggcataacgcaggtactgcttggtcactttgaaagagccttgcgacaggatggtacccggcgcaccgccggtatcaaccagctgataagcaacctggtaagaaccgtcagggtttggcgtcacctgtcctacgaccacggcgtcaacgcccagcgcggaccatgccgccggctgcacttcctgagcgctacccggctgctgaggcaggcgcgagcgatccagcggattaaacttaccgctgttacgcaggtcagccgctaccacgccgccaatatcttcaggcgcagcgcccgggccagcccactggaatggcaccacaccgatagggcgcgccgagtccacccctgggtgatctcgatgcgtacttctgcgtgcagcaccgccgcccacagcatcaaaaaaccaaatgctactcgtaatgcctgcttcatcatatctcccttatccgggcggaaagcccacgataatttagcagaatgttaacaaacccaaatacacaaaactaccaaaaccctgtgactaccatagattgtttttccccgcttgcacggggaattttctacttatggtttaaagtccagtggcgcatttttgaaagtttcataaatagcctgcgacggcggtttagggaacttcgtcatccggtttgtcgccgccagcatttgttgacagaacgccggatcgccgccttcagatttcacactcaacaatgttccatcctgagccaggttcacacgcaaagtacaggttttgcccttataggtatcccagtcatagagatggcctctaatggcattctgaaccagttgactatagttgttaatctcagcctgagatgctccaccctgcccctgcttacttcctttagcaggagaagagcccccagcgctaccgctggtgttacctttcggcgcattcttacctgaactcaggtcaccgagcagatcgtcaacaccgcttgcttctttagctgcagcggctttcttggccgcggcggccttcgcggctgcggccttggccgctttatcagccgccgctttttctgcggcggcagctttggcggcagcggctttttcggcagctgcggctttttcagcagcggccttctcagcggcggccttttctgccgcagcctgtttcgccgcttcctgctgagctttcttctcggcctgctgctgcgctttcttctctgcttcctgctgagcttttttcgcagcttccgcttcggctttcttctgtgcatccgcggcggctttcgccgcttcggcttccgcctgcttcttcgcgtcagcggctgctttggcagccgccttagcggcagccgcttccgcgactttcgcctgggcatcggccttagctttagcatcagcggcggctttagcggcagcttcctgcgcctctttcgcctgggcatccgctttcgcttttgccgcggcggccgctttggctgccgcttcttcagcctgtttttgctgttctttcgcttctttagccgcttcctgcgcctgcagacgttcttgttccatttgcttcaggcgttcctgctcggcagcctgtttttcccgcagctcttcagcctgctgctgagcctgcttttcacgctgctcggccgcgcggcgcgcgctggactgctgctgttgctggcggttgtagttgttgactaccgcgccaggatcgaccatgactgcatcaatggatgaacctccgccgccgccggcagaagcatccagatgctcgtcgaacgaactccagatcagtagcgcaatcagaatgatgtgcagcaccactgaaactatgatcgctcgtttaagcttatcgttttgttcggttgcctttgacactatcggttcccaaaaactgttcgcctgttgccgcttaaaagcagcggcggaatgctatcgatatccaccaccgctcgcttcgcgggccgattaaataggcttggtcattaagccaaccgatttaacccctgcgctatgcaacaggttaagcgctttaataatttcatcgtaaggcacatctttcgcgccgccgataaggaacaccgttttctcattcgcttcgagtcggcgcttcgcttcagcaatgacctgctccggcggcagttgggacaacgtttcctgaccgactttcacgctgtactgccctactccggagacttcaacgataaccggtggttcatcgttgcttttcaccgcttgcgactccgtggcgtccggcagatcgacttccacgctctgcgtaatgatcggcgctgtcgccatgaagatcagcaacagcaccaacaggacatccagcagcggaacgatgttaatctcggacttcagttcgcgacgtccgcgtccacgtgctctggccatggcttaccccttattgctttcgctgctggtaaacgcctgacggtgcagaatggcggtgaactcttccataaagttgtcgtagttcagttcaagtttgttcacacgctggttcaggcggttgtaggccataaccgccgggatggcggcgaacagaccgattgccgtggcgatcagcgcttccgcgatccccggcgcaaccatctgcagcgtcgcctgcttcaccgcgccgagtgcgataaaggcgtgcatgatcccccagacggtaccgaacaggccgatatacgggctgatggaacccacggtgccaaggaacggaatatgcgtttccagcgtttccagctcgcggttcatcgagatacgcatcgcgcgcgacgccccttcgacaatcgcttccggcgcatggctgttggcgcgatgcagacgcgcgaactctttaaagccgctgtaaaaaatctgttcggaaccggcgagactatcgcgacggccctggctctcctggtacaggcgagacagttcaataccggaccagaacttatcttcaaacgcttcggcttcgcgggtggcggaattgaggatacgcgttctctgaatgataatggcccaggaagcgatagaaaaaccaatcaaaatcaacatgataagtttaaccagaaggctcgccttcaggaacaaatcaaggatattcatgtcagtcactgcttaaactccgcgacaatagacttgggaagcgcacgaggcttcattaagagtggatcaacgcacacaatgagaacttcagcttcgttcaaaactgtattctcggcgttgacgattcgctgcgtgaaaaccaaagaggtgcctcgcatcgaggtaatttccgtctggatttcgagcatgtcgtcgagtctggcgggcgcaaaatactccagcgtcattttgcgaacgacaaaggcaactcgttcagccaacagaacctgctgactgaagtgatggtggcgcagcatctctgtgcgtgctctttcataaaaagcgacgtaactggcgtggtaaaccacaccaccggcatcggtatcttcgtagtagacccggaccggccatcgaaacagcgttgtattcactttacatcccggtaatgcaaaaaagagtagtgctttcaaacttcgctactatacgcgcgggaatcgtggtttggaatgggagaaagtaaacggcgagtaaatttttatgggcttatgcaagcccatgcggttaacagacttctcttatactcttatctttcaaaagaagaaaaagatcaggcctacgaagagaacaatatcagcgataagcggacaaaaaatcccctgccagtgcacggctttcggacggaagcccacaccgtgaatgacgccggcgcacaccgcccacatcagcaagaaaccatgccagatttcaagctcgctggtcttcgccgcaaagcgcgacggatcccagaagatgcagcctgccagcagcagcgccattaataaggaaagcgcccttaacgggcgcttgtccattatcgcgtaaagggtcgcgataattttcatcaatgctcttctttacctgctttggtggcttccacgtgctcaagcgccagcgcggtaatcaccccaaaggcacaggcaagcagcgttcccaaaatccatgcgaagtaccacatatatagctccttaccttagtacagcgagtgggtgttcttttcgatgtcttcgcgggtaatgcggccaaacatcttccagtaacaccaggtggtgtagccgaggataatcggcacaaacacgatagccacgtaggtcatcacattcagcgtcagctgactggacgttgcatcccacatcgtcaggctcgcgttcagcatcgtgctggacggcatgatgaacgggaacatcgcgatacctgcggtcaggataatgcaggccagcgtcagcgaggagaacaggaacgccatggcgcctttatctgcttttgtcgacacgacggtcagcagcggcagcacaacacccagggcaggaatggcccacagcgcaggcatattgttaaagttcaccatccacgcgccagcttcacgcgccacttctttggtcagcgggttagacgggccggtatgatccagcaccgatttcaccacatagccgtcgatgccgtaatagacccaaacgcccgccagcgcgaagcagaccagcgtcaccagcgccgccaccgtggaaacggtacgggtacgcaggtgcagttcgcctacggtacgcatctgcagataggtcgcgccctgcgtcaggatcatcgccacgctgacgatacccgccagcagaccaaacggattcagcagctggaagaagttgccggtgtagtacagacgcagatactcatcgatatggaacggtacaccctgcagcaggttgccgaaagccacgccgataaccagcggcggcacaaagcttcccacgaagatgccccaatcccacatgttgcgccagcgggtatcttcaatcttggaacggtagtcaaagcccaccggacggaagaataaagacgccagcaccagaatcatcgccacgtagaagccagagaacgcggcggcgtataccatcggccaggcagcaaacagcgccccgccggcggtgatgagccacacctggtttccgtcccagtgcggggcgatggagttgatcatgattcgacgctcggtgtcattacgaccgaggaaacgggtgagcatgcccacccccatgtcgaaaccgtcggcgacggcgaagccaatcagcagaacgccgatcaatagccaccagattaaacgcaatacttcataatcgatcatttgacgactcctgtcttagcgtgccgactgaatagccgcggaggactgttcaaagtgatagcgacccgttttcaggctgctcggtcctttgcgggcaaacttgaacatgaggaacagttcagccaccaggaacagcgtatacagaccgcagatcagcaacatcgagaagatcagatcacccgcggtcagcgacgagttcgccaccgctgttggcagcacttcaccaatcgcccacggctgacggccgtactcggcaacaaaccagcccgcttcaacggcaatccacggcagcggcaggccgaagaacgcggcgcgcagcagccattttttctcgccaatgcggttgcgaatcacggtccagaaagaggcgccgataatcaacagcatcagcacgccgcacgccaccatgatacggaaggcgaagtacagcggcgcaacgctcggaatagagtctttggtcgctttggcgatctgctcttccgtggcgtcagcgacgttcggggtatagcgcttgagcagcaggccataaccgaggtctttcttaatgctattgaactgatcgcgaaccgcctggtcagtcgaaccagcgcgcagctgttccagcagcgcataggctttcatcccgttacgaatacgctcttcatgctgcgccatcagatctttcaggccgataaccggcttatccaccgagcgggtagcgatgatacccagcgcgtaggggatctggatggagaagtggttggtttgcgcttcctgatcgggaataccaaacagggtaaaggcagccggcgccggctgagtttcccattcagcttcaatcgctgccagtttggttttctgcacgtcgcccatttcgtagccggattcatcaccgaggacgataacggagaggatagcggccataccaaagctcgcggcaatcgcgaaggagcgcttagcaaaggcgaaatcacggcctttaagcatgtaccaggagctgatagcaaggatgaacatcgcgccagtcacatagccggaggccacggtgtggacgaatttaacctgagcaaccgggttcaggaccagctcggagaagctgaccatctccatacgcatggtttcaaagttgaaatccgatgcgatcgggttctgcatccagccgttggccacaaggatccacagcgcggagaggttagatcccagagcgaccagccaggtcaccgccatgtgctgaactttgcccagacgatcccaaccgaagaagaacagacctacaaaggtagattcgaggaagaaggccatcagaccttcaatggccagcggcgcaccgaagatatcgcccacatagtgagaatagtaagaccagttagtcccgaactggaactccatggtcaaaccggttgcgacacccagagcgaagttgataccaaacaacttgccccagaacttggtcatatctttataaatctgtttgccggaaaggacgtagaccgtttccataatggccagcaggaacgccataccgagcgttagtggcacaaaaaggaagtggtacatcgcggtcaaggcaaactgtaagcgcgacagttcgactatatctaacatcatgactccttgctcatcgcatgaagactccgagaacgaacccaataattaaggttcatacgcatgccccaatacaaaattatttgctccctggtacgttactgctcatctggcgatgaaacagcgccctcgcaaaggttacaaatacgttaacgaaaaaaccaaatgattctctaatatattacgccgcaataaccttacaataaataggattttattgttccagcattacatttttcgacggtgatcaatatatagcgaaaatgccaggaataggccaatttgatttgcgacaatttaacggtttttggtgattttttccaaggattaagtattgatataaatcaattttttctttttatgttaattatgtggcgcaataaagaataacagtgaaattgatgttaaaaatgtgtttaaagtctgccgctagcggttactaaaaaggggaaatgagaattataggtaatataattttaaccttgaccaatttaagacaagaaatgatgcgatcctaataatgttagaccggtcacactatttttcccaatcgaaatgcaaaaaaataacgcgcgcgttttcctgtttatttcacataaaattaaccacctccctccccagcgaagcggcgagtgattattcccaataatattcattaaatcaatgcaatagcggtttttaatgcgagaaagagcctgcgaccgacgacaaggcaaaaaaaaggccacctgacggtggccaaccatgtcgaaatcggacattagtctgctcctgaggagcagtgagggtttacttgatgatagctttcagcgcttcgccaatatccgccaggctgcgaacggttttcacaccggccgcttccagcgcagcaaatttctcatcagcagtacctttaccgcccgcgatgatggcgccagcgtggcccatacgcttgcctttcggcgcggtaacacccgcgatgtagccgacaaccggcttagtcacgtgctctttaatgtaagctgccgcttcttcttccgcgctgccgccgatttcaccgatcatgacgatcgcttcggtctgcgggtcttcctggaacattttcaggatatcgatgaagttggagcctgggatcgggtcgccgccgataccgacgcaggtagactggccgaagccgtagtcggtggtctgcttaaccgcttcataggtcagggtacctgaacgggaaacgatgcccactttacccggcttgtgaatgtgacccggcatgatgccgattttgcattcgcccggggtgataacgcctgggcagttcgggccgatcatgcgaacgccagcttcgtccagcttcactttcacggtcagcatatccagggtcgggataccttcggtgatggtgataatcagcttaatacccgcgtcgatagcttccagaatggagtctttgcagaacggcgccggaacgtagataacggtcgcagtcgcaccggtggcttccacggcttcacgcacggtgttaaataccggcaggcccaggtgagtggtgccgcctttacctggcgttacgccgccaaccatctgagtgccgtaagcgatcgcttgttcagagtggaatgtaccctggctaccggtaaagccctggcagataaccttggtgtctttattaattaaaactgacattatttcccctccactgcggcaacaacctgctgtgctgcgtccgtcagacttttcgctgcaataatattcaggccgctgtcagccagttttttcgcacccagttcggcgttgttaccttcgagacgaaccacaaccggtacgttaacacccacttcttcaaccgcgccgatgatgccgtcagcgatcaggtcgcaacgtacgataccgccgaagatgttaaccagaaccgctttaacgttgtcgtcagagaggatgattttgaacgcttcggtcacgcgctctttggtcgcgccgccgccaacgtcgaggaagttagccggttcgccgccgtgcagcttaacgatgtccatggtacccatcgccaggcctgcgccgttaaccatgcaaccgatgttgccgtcgagcgcaacgtagttcagttcccactgcgccgcctgagcttcgcgcggatcttcctgagactggtcgcgcatttcacgcagatccggctggcggaacagcgcgttaccgtcagcgcccagtttaccgtcgaggcagatcaggtcgccctgcttggtgataaccagcgggttgatttcgatcagcgccagatcgcgctcaaggaagatggtcgccagacccatgaagatcttggtgaactgctgaacctgtttaccttccagacccagtttgaacgccagttcacgaccctggtaaggcatcgggcccgccagcggatcgatggcgatcttgtggatcaggtgagggtttcttccgccactttttcgatttccacgccgccttcggtagacgccatgaacaccacgcgacgggagctgcggtcaacaactgcgcccagatacagctctttatcaatatcggtcgccgcttcaaccagaatctggtttaccggctggccgttagcatctgtttggtaagtcaccaggcgtttgcccagccaatgctcagcaaaagcgcgaatctcttctttgctcttaactactttcacaccgcccgctttaccgcggccaccagcgtgaacctgacatttcactacccacggacccgcgccgatttttgaagcggcttcttctgcttcacgcggagtagtacaggcataacccaccggcgccggtaagccatagcgggcaaaaagttgttttgcctgatattcatgtaagttcatgtgttcagtccatccttcaggtaatcgttatcatgtagccgacacaattgcaggccgatgatgtttttattggcccgggcagacgcgccggccattgtgactactacacgtccagcagcagacgagtcggatcttccagcagctctttaattgctaccaggaagcctaccgattcacgtccatcgatcagacggtggtcgtaggagagcgccaggtacatcatcggcagaatttctaccttgccattgaccgccatcggacggtctttaatggcatgcatacccagaatggcgctctgcggtgggttgatgatcggcgtggacatcagagaaccgaatacgccgccgttggtaatggtgaagttaccgccggtcaggtcatctacggtcagcttgccgtcacggcctttcactgccagctctttaatattcttttcgatatccgccatgcccagcaggtcaacgtcacgcagcaccggagtcaccaggccgcgcggcgtagaaaccgccatgcttacgtcgaagtagttgtgataaaccacgtcgtcgccatcgatggaagcattcacttccgggtagcgtttcagcgcttcaacaaccgctttcacgtagaaggacatgaagcccagacgaataccgtgacgtttttcgaacgcttcgccgtactgcttacgcagatccataatcggcttcatgttgacttcgttgaacgtggtcagcatggcggtagagtttttcgcttccagcagacgctcggcaacgcgtttacgcagacgggtcatcggtacgcgtttttcagagcggtggcccagttgcgcaaccggcgccgcagcagcggctggcgctttcgcttcagctttcgccggcgcgctcgccagatatttctcaacgtcttcgcgggtcaggcggccgccaacgccggtgcctttaatcgccgccgcgtcgaggctgtgttcagccagcagacgacggattgccgggctaagcgcgtcgttgctctgctcttccagagacgcttgctgacgctgagccggggtggactctttggtatcagctttcgcatcagcggctttaccggcgctgttgccttcacgcaggcggcccagaatctgacgagacagcacggtggcgccttcgtcttccagtactgcatccagaatgccgtccgctgatgccggtacttccagtaccactttgtcagtttcgatttcgaccagaacttcgtcgcggactaccgcgtcgcccggttttttgtgccaggtggcgacggttgcgtcagctacggactcaggaaggtcgggaaccagaatatctacgctactcattgtgtatcctttaattaatcgacgttcagcgcgtcattgaccagatcttgttgctgtttctggtgaacggacatataccctaccgccggagaggcggaggccgggcggcctgcataacgcagagaggccccaaatggaactacttcacgaaggtggtgctggctgcagtaccatgcgccctggttgagcggctcttcctggcaccagacaaaatcgtggacgtgcgagtaagctttcagcgcttcctgtaccgcctgatgcgggaacggatagagctgttcgatacgcacgatggcgacatctttttgctcgtttttacggcgctgttccagcaggtcgtagtaaaccttaccagagcacagtacgacgcgtttcacggcttgcggatcgagctcgtcgatttcgccgatagccggcataaaggtgccgttcgccagttcgtccatgctggaaaccgccagcgggtgacgcagcagagatttcggcgacatcaccaccagcggacggcgcataccgcgcagcgcctgacgacgcagcatgtggtaaacctgtgccggagtggacggtacgcaaacctgcatgttctgctcagcgcacagttgcagataacgttccagacgcgcggaggagtgctccgggccctgcccttcgtagccgtgcggcagcagcatcaccaggccgcacatccggccccatttctgctcgccggagctgatgaactggtcaatcaccacctgcgcgccgttggcgaagtcgccgaactgcgcttcccagatggtcagggtgcgtggttccgcggtggcgtaaccgtattcgaacgccagtactgcttcttcagacagcacggagtcccagacgcggaactggccctggccgttgtgtacgttctgcagcggcgtataagtagaaccattgctctggttatggataaccgcatgacggtggaagaaggtgccgcgaccggagtcttcgccggacagacgcaccggaatcccttcatcaaccagggtggcgtaagccaggttttccgccgcgccccagtcgaacagcttctcgcccgccgccatcaactgacggtcgccgtagattttcgctacacgagactgcatctcaacgctttccggcaccgtgctgatacgtttggccagctcttgcagacgttttggctcaactttatccgggtagctctcgtcccactcatggttgaggtacggagaccaggtaaaggagtgcatgttcatcggacgccattccgctaccacgcaatcgccggcatccagcgcatcgcggtagaggttaacctgttcggtagcgtcttccagcgtcgcgactttgtcctgttccagcttgtcagcatagattttgcgcggagtcggatgctttttgattttctggtacatcagcggctgggttgcgctcggctcgtcggcttcgttgtggccgtgacggcggtagcacaccaggtcgatgaagacatcgcgtttgaaggtattacggaaatccagcgccaggcgggtaacgaaagcgaccgcttccgggtcatccgcgttaacgtggaaaatcggcgcctgaaccatcttaccgatatcggtgcagtacggcgtagaacgcgcatccagcgggttggacgtggtgaagccaacctggttgttgataacgatgcgaacggtaccgcccacttcgtaaccgcgcgctttggacatgttcagggtttcctgaaccacgccctggccggctaccgcggcgtcgccgtggatggtgattggcagaactttgttgctgctcggctcgtcaagacgatccagacgggcgcgtacggagccgataaccaccgggctaacgatttccagatgcgacgggttaaacgccagcgccaggtgaaccaggccgccttcggtttccatatcggaagagaagcccatgtggtacttcacgtcgccggtgccgaggtgttctttatgtttgcccgcgaattcgtcgaacaggtcctgcggttttttacccagcacgttgaccagtacgttcagacgaccacggtgagccatgcccagcaccacttcacgggtgccgcttttaccggcgtggcggatgatctctttgagcatcgggattaacgcatcgccgccttccagcgagaagcgtttcgcgcccgggaatttggcgccgaggtagcgctccaggccttccgcggcggtcagctcgctgaggaagcgctttttctcttccgcggtgaagctcgctttgcctgctactgactcaatgcgctgctggatccagcgtttttcttcagtagaggtgatatgcatgtattccgcgccgatggagccgcagtaggtttgcttaagcgccgcgatcaggtcgcccagcttcatcgtgtcttttccgatggcgaaagaacctacgttatagctttcctggaaatcggcctcggtgagatcgtggtaagccggatcgagatccgccactctctcttgctgccacagtcccagcggatcgagattcgcctgctggtgaccacggaagcggtatgcgttgatgagctgcaggactttaacctgcttcacattggtatcagggtcggatatcgaagaagtgtaacgtgaggcatccttcgccagtcgacggaaataatcacgcgttttcgaatgaaattgatccggtttaactccggtgccaggtaactgctggaacatcgaacgccagttggcgtcaacagagtcaggatcggttaagaagtcttcatagagctgttctatccagctctggttcgaaccagagaggtaagaagagtccagccaggctttcattgcgccgttctgcatcgtgatcccttaagcatttttatgcttatttcgccgtagaaactaccacgcacaccgagtgcacgtgccggggttcacttgttgcggacgagttgtggtttctatccgctaaggaacctttaaaaactgccattaatcttcagcgttcaggctgcggttgcgttggctgccttcgcttaccccggtcacatagttcactatgctcccgggatgcgctcagttgccgccttacctcgcactgaacgcctcgattactggtacatatttggcggtttttaaagatttcctgctatctgtcccccggcagcgctaacgcttgccggggctactgctttggtagcccggataagcgctagcgccatccgggacagaccgtgttgcttacgcgctgcgctgcagcagcatcgacttaatatgaccgatagcgcgcgttgggttcaatcccttaggacacacactgacgcagttcataatgctgtgacagcggaatacgctgaaagcatcgctcagaccttccagacgctcgctggtttcggtatcgcgactgtcgatcaggaagcgatacgcggccagaaggcctgccgggccgatgaacttgtccgggttccaccagaacgacgggcaagaggtcgaacaacatgcgcacagaatacactcgtacagaccatcgagtttctcgcgctgctcaggcatctgcagatgctcgcgagccggaggattttgcccattattcaataagtaaggcttaatcttctcatattgtgcgtagaattgccccatgtctaccaccaaatcgcggataaccggcaatcctggcagcggacggataacaattttcttacccggctgattcagcgcggagatcggcgtgatgcacgccagaccatttttaccgttcatgttcagaccatcggaaccgcacaccccttcacggcaggagcggcggaacgacagcgacggatctttttctttcagctggataagcgcatccagcagcatcatgtcgcgaccttcttccgcttcgagggtgtaatcctgcatatgcggagcatcgtcaacatccgggttatagcgataaattgaaaactcgagtttcatattcctgtctccgcattaataagtacgaatcttcggcgggaatgccggacgcagtttcggttccatgttgaccgctcgacgcgtcatggattccgactctggcagatacagggaatggcacagccagttttcatcatcacgttccgggaagtcgaagcggctatgcgcgccgcggctttcggtacggaagtttgcggataccgccgtggaataagcagtttccatcaggttatccagctccagacactcgacgcgctgggtgttgaactcgctggaagtgtcgtccaggcgcgcatttttcagacgctcgcggatctctttcagctgttccagacctttgtgcatcgcgtcgccttcacggaagaccgagaagttatgctgcatacattcctgcagcgctttacggatagcaaccgggtcttcgccggaacgggtgttgttccaacggttgaggcggtccagggaagcttcgacatcggactcgctggcagcgcgcagcgcgccctgctcggcgatggattcctgcagatgcagacccgccgcgcggccgaagaccaccaggtccagcagcgagttgccgcccagacggttggcgccgtgtactgatacgcaggcaatttcgccaacggcgaacaggcccgggatcaccacatcttcgcccttctcgttcacggtcagcgcctggccggtcactttggtcggaataccgcccatcatgtagtggcaggttggaataaccggaatcggttctttaaccgggtcaacgtgggcaaaggtacgagaaagttcaagaatgcccggcagacgggattccagcacttctttacccaggtgatccagtttcagcttggcgtgcgggccccacggaccatcgcagccgcggccttcgcggatttcaatcatgatggaacgcgccaccacgtcacgacccgccaggtctttcgcgttcggcgcataacgctccataaagcgctcgccgtgtttgttcagcaggtaaccgccttcgccgcggcaaccttcggtgaccagcaccccagccccggcgataccggtcgggtggaactgccacatttccatatcctgcaccggaacgcctgcgcgcagagccataccgacgccgtcgccggtgttgatgtgggcgttggtggtggattgataaatacggcctgcgccgccggtcgccagcacggtagcgcgggctttgaagtacactacttcaccggtttcgatgcacagtgcggtacaaccgaccaccgcgccgtcctggtttttcaccagatcgagggcataccattcggagaagatagtggtgtggtttttcaggttttgttgatacagggtgtgcagcagcgcgtgaccggtacggtcggccgccgccgcggtacgtgccgcctgctcgccgccgaagtttttcgactggccgccaaacggacgctgataaatacggccgtcatcaagacgggagaacggcaggcccatatgttccagctcaagaatcgcttccgggccggtcttacacatatattcgatggcgtcctggtcgccgatatagtccgaccctttcacggtgtcgtacatgtgccattcccagttatcttcatgggtattaccgagcgcaacggtgatgccaccctgcgcggaaacggtatgggaacgggtaggaaaaactttagagagcagcgcacaggtctgtccgctctgggaaatctgcagcgccgcgcgcatacctgcgccgccggcaccaattacaactgcatcaaattctctgactggcaatttcattacacaccccacaccacaacaaatccataaagaacgtaagccaccagcgccacaacgataataagttgcagaactaagcgcacggccagtggtttaacgtagtccgttaacacctgccacataccgatccaggcgtgaatcaggatggaaacgagagccagcagggtaaagactttggtgaacgcggaggagaagaatccggtccagatttcccaggagatctcaccggaggtggcgaagaagccaaccatgtagatgatgtagagggtcagaacgatggcggtagcacggaccagaataaagtcatgtacgccgttgcgtcccagtgctgaggcgttgcttaccatacgaggactcctgcgagaagtgaaagcacgacagtaataacaaaagaaattttggcggagcgtgtccctgcttcgagggtttcttccagatagccaaagtccatcagcagatggcggataccgacaacggcgtgataagccagcgcggtgaggatgccccacatgatgaacttcacgaagaagctattcatgatggaagcggccgtcaggaagccctccggagaggaaaggctggtgcccagcaaccaaagcagaataccgaccgccacaaaagtgatcacaccggatacgcgatggagaatggacgctatcgccgtgattgggaatcgaatcgtttgtagatccagattgacaggtctttgttttttcacatttcttaccatgaataacgcccacatgctgttcttattgtttccttcctccggtctgcttgcgggtcagacagcgtcctttctataaccagaagtcatgttaaaacccctttccaggagtaaaagcgtgaccaaacaacgctgggtggctcgggattgcagggtgttccggagacctggcggcagtataggccgttcacaaaatcattacaattaacctacatatagtttgtcgggttttgtccggaacagtgatcaaggtcacgattacaacattattttaaattttaatcacctgatttgacaaatattaaacattcttgttacaaccattactagattaatgcaataatgcccaaaagttatggggtcactctttcacctgagaataagttatgtaacagtgtgatggtattgaccgatgtaatcaggacagttattagtggtatacaggttttaatattcgggctgctaaaacgctgatttgctgccgtttcactcccgggctgaagacgtaccatcaagcgcctgcgctctgtaccctgcaattttcgcgacacagagctgtgagcaacataacaatctggtaacgtagtcaggttcgggccgaatgcaaatccaccacccggcagtcttaagcaataaaaggcgctaaggagaccataaatgtctgatgctaaagcaaaaatcaccctgggtggtgacactgctattgaacttgatgtgctaaaaggcacgctcggtcaggatgttattgatattcgtagtcttggttcaaaaggtgtcttcaccttcgaccccggtttcacttcaacagcctcgtgtgaatctaaaattacttttatcgacggcgatgaggggattctgctccaccgcggtttcccgatcgatcagctggctaccgagtcaaattatcttgaagtgtgctacatcctgttgaacggcgaaaaaccgactcaacagcagtacgacgaattcaaaactaccgttacccgccacaccatgatccacgagcagattacccgtctgttccacgcgttccgccgcgactctcacccgatggcggtgatgtgcggtattaccggcgcgctggcggcgttctatcacgattccctggacgtaaataacccacgtcaccgtgaaatcgccgcctatcgtctgctgtccaaaatgccgaccatggcagcgatgtgttacaaatattctatcggacagcctttcgtgtatccgcgcaacgatctctcctacgcgggtaacttcctgaatatgatgttctccacgccgtgcgaaacctatgaggttaacccggtgctggaacgcgcaatggaccgtatcctgatcctgcacgctgaccacgaacagaacgcatcaacctctaccgtccgtaccgcaggctcttccggcgctaacccgttcgcctgtatcgctgcgggtatcgcctccctgtggggaccggcgcacggcggcgccaacgaagccgcgctgaaaatgctggaagagatcagctccgttgaacacattccggaattcgtgcgccgtgcgaaagacaagaatgactctttccgcctgatgggcttcggccatcgcgtgtacaagaactacgatccgcgcgccaccgtaatgcgtgaaacctgccacgaagtactgaaagagctgggcaccaaggacgatctgctggaagtggcgatggaacttgagcatatcgcgctcaacgacccgtacttcatcgagaagaaactgtatccgaacgtcgatttctactccggcatcatcctgaaagcgatgggtattccatcctcgatgtttaccgtcatctttgcgatggcgcgtaccgtcggctggattgcccactggaacgaaatgcacagcgacggtatgaaaattgcccgtccgcgtcagctgtataccggctaccagaagcgcgatttcaaatccgatctcaagaagtaatttcaaccctgtcggggttagcaaaaaaaatcggggaccttccccgatttttttatttaagcgtacaaataaatttgaatcgttcaacgactggcgttaatgctggcagccagggcaccagtaaaagggtcgcgatgacagcatggttttctcaatgatgctgccgcagcgttcgcaggcctcaccctcgcgatgaaaaaccttaaagcggaatagcgcgccatgatgtttgttttcatccacttgcccgcgggtgcggtaagaaaggcgcgggatatccagcagcgcgtgcgccagcgcatcgagctgtgtttcattgagctcagcggccttatgctgcccggtcagccccacctgccacaggatctctacccgcagatagttaccgagcccggcgagaaacgcctggtccagcaacaggccggaaaactggcgattgcgaaatttcgccgacagcagccgctctctgacctgcccggcggttaacgtcatatccagcacatccggcccgacccgttgtaaaaacggatgatgggccagctgttgcgccgtcagtatctcaatctcggaggcgctatagagcaaaatcgccttgcgtgcggtctgtaacctgacgcgcagcacgcgcttcgattgcggctcaacgcccgcatccaccacgcgccagacgccatacagctggttatggctatacagcgtcaatccgccggagaagtgggttaacaaggccttgccgcgggtggcgatatgggtcacccgctgaccaattagctgagtttgataaggttgcaactgtggaaaggcgaaccaggcttcggttaacggttcgcctttgatagccgcctccagggtatccgccgcgcggcggatctccgggccttcaggcataatttcgtccttctgttagtgcgtggcaccgccgccaattttgacgtcgtcatcctgttcaagggcgacggcaatcgccgtttccagcgccgcgcgtaccgtcgcgaccgacatactcgcctgccccgggtgggccgccgcctgttcaggcagataaggaatatggataaaaccgcccttctgcccgctttttccccgcagttgatgcagcaaaccatacatcacgtgattacagacaaaagtgcccgcggtttgcgacaccgaagccgggatcccctgctggcgcagcgcgctaacgatcgctttgatcggtagcgtgctgaagcatgccgcggggccatcagcgacgatcggctcatcgatcggctgctggcctttattgtcggggatccgcgcatcatcgacattgatagccactcgttcgacggtaatatcgacacggccgccggcctgtccgacggcaatcgttagctgcggttgataggtttccagcgcggccttaagcaccgttagcgcctcgccgaacacgcagggtaactgtttagccaccacctgctgtccgcgaataatcatgccatcaagttgcttaaccacttcccatgaaggattaaccgtttcaccgccgaacggctcaaaaccggtaattaatacgccagccatcatccctccttacaggaacatcaggaaatagagtaagaatacgttgacgataagcagcaggattccggtcggcacctgggctttaatcaccgcgtttttatccggcagttccagcagcgccgccggtacgatattaaagttcgccgccatcggcgtcatcagcgtgccgcagtagccggaaaacataccaatcgccgccattaccgccggattgccgccatgctgcaggactaaaatcggaatgccaaccccagcggtcacgatcgggaaagcggcaaaggcgttgcccattaccatcgtcagcaccgccatgccgatggcgtacacggccacggcgataaagcgattatctaccgccagatagtgctcggtcagccatgaaatgctggttccgacgcccgccgtggtaaatagtagccccagcaccgcgaggatttgcggcaggataaaggcccagccgacggaatcaagcaaacgacgcgcttcctgcatcggctgcgccaccgtttcatgggtcatacgaatcgccatcgccaggccaatcagcgtaccgacggtcatcgagaacagggtaatcagcgtcgcgtggttgcccggcccgaagagcgccacctgccatgaaggcagattgttaaacagcagtacgccaatgacggtgacgaccggaatcgccagcgccggatagaaaagtttgttaccgaggcgtttcgcgctggcggttttctcttcctgggtacgctgatggtagctgccgagacgcacgccgccaaaaccagcaattagcgccagtacgaccaccaagccgccgacggcgatgttcaccgtacgcttatcgcccaccagttgatatgtccagtcaccgagcaagaacaccagcccgtacaggccccagaacaggccggttgtcagacgccgcggattacttttgtcgcgccaggacatgatagccacgaccagcagtaccgcaccggccagccagtataaatacgtttgttggaaattcatgccgcaccgcctttcgcctgcccggcgttaacccggtccagctcgcgctggagatggcgatcgaggcgccacaggcgcgcggcgtggatcaggaaggcgcagatagccgtcgggatcccccacagggcaatatgcaacggttccgtctggatcccgcccgactccagcataaagttgtgcatgaagatgatcgcgccaaaggcgacaaaaatatcttcaccgaaaaacagcccgacgttatcggtcgccgccgacatcgcgcgcaggcggtagcgcacattacccggcagcgggccaaagcgcttttccgccgccccctccgccattggcgccagcagcgggcgcaccatttgcggatgcccgccgaggctggtcaatcccagggcggcggtggcttcgcgcacaaacagatagacgatcagcagacgtccggcggtcgcgctatggatcttcgcgatccacgcttgcgcccgctctttcagaccatgtcgctccagtagcccgatcaccgccagcggcagcagcagaataaacggcagattacgggtattgaggaagccctcgcccagtttatccagaatagtggctattggcatatgcgccgccacgccggtgacgatcccggagattatcaccaccagcaccgggttaaagcgtaatacaaaaccgaccacaatcacggcaatgccgatcagcggccagagggatatcgcctcttgcataataacgtcctgttcagttgtgagtgttgtttattgtttgatttaattattattaaaatactcaggcggccgattaatcgatgtccgcgctgacgtcgatattgcgcccggcaaacgcggcgcgcaagcgtcgggcgaaatcgagcgcatgagcgccatcgccatgcaggcagaccgtttccgccttcacatgcgcccattcgccgctcaggctgcgcacccggttgtgctgcaccatttccagcgtttgcgccagcgcctgctcttcgctttcaatcagcgcgcccggctggctgcgcggcaccaggctaccatcggcgagataaccgcgatcggcgaagacttcctggcgcgtcgtcagctgatagcgctgtccggcgcggataagctcgctccccgccagcccgaccagcaccagtccggcgtcggcatcgcgcaccgcacgggcgatagcatcggccaaaggcggctctttcgccgcctggttgtacaacatgccatgcggtttgacgtgccgcagctcgccgccctgggcatgcacgattgccgccagcgcgccaatttgatacagcacttgggcatagaccgtctctggcggtaactgcatcgcggtgcggccgaaattttcccggtccgggaagcttgggtgcgcgccaatagcgacgccgtttttcagcgcctcgcgcacgcactgctgcatgagcagcgcatcgccggcgtgaaagccgcaggcgatattggcggaagagaccagctgcagcagcgcgctatcgctggcgcagccttcgccgaggtcggcatttaaatcaattttcatcgcttaatctccaggccagttgttcaaggtagcgctgctggtcggcgcgcgctttcagcgcttcttccagcgaacaggggacgaaatggatcggctgacccagcggaatttgcgccagttggtacatatcggcttcaataatgcacgctatacgcggatagccgccggtggtctgcgcatcgttcatcaacacaatcggctggccgttatgcggtacctgtaccacgccgggcagcaggccatgggagagcatttcccggtcggttgtgcgcttgagcggctgaccctgcaggcggtagcccatccggttgctctgcggactcagcttccacggcgagcgccagaaagactcctgcgacacgctgtcgaattcgtgatactccggccccggcagcgcgcgaataatattgcctatcggcagctgtttaacgccgcgcgaagcgctaaagcggcgggaggatttcccaatcttcaattgatcgccatcctgcaaccggcgcccttcgattccgccgataccgactttcagatcggtagagcgggaacctaaaacttcaggaacgtcgataccgcccgccaccgccaggtagctgcggatcccatgctgaggattttttagcaccagccgctgtccggccttcgcttccattcgccagcccagccagaccggcgcgccgtcgagcgtcgcttcgcaggcggcgccggtcaacgcgaaccagcaatggcgggtaaactgtacatcgacctgacccagcgtaatttccagcgccgccgtctccggcgcattgcccaccagcagattggcaatggtcatcgccggtttatccagcgcgccgcagcggctaattccccactggcgctggccttcccggccgccatcctggaccgaggtgtacatgccggcgcggataaatttcaacataccccctccttctgcggcacaaagcgcacgcgatcgccagaacgcagcagcaccggctcttcacgctttggatcgaataatgccagcggcgtgcgccccagtagctgccagccgcccggcgtcgccagcggataaataccggtttgcgatccgccgatgccgacggatcccgccggtaccagtacgcgcggctcggcgcgacgcggcatcgccagctgctccggcaggccgccaaagtacggaaaccccggctggaaacccaggaaccacaccatatactccaccgaagagtgcagttcgaccacctgcttttcgctcaacccgctatggcgcgcgacgtcgccaaggtctggccccgcctcgccgccatagataaccgggatacttatctcacgggattccggctccagcgcatcgctctcttcccaccagcgctgcagcttgtcaatcgcctcccacgccatctcctgcggacgacgcagcacaacggtgatgttgttcatccccgggatcacttcaaccacctcttcgcgatcggtcaaccgctgcgtcaggccccagatacgtttttggctctccagggtcaccggaggctcaagctccaggaccaccgccgtttcacctaatagataacaacgcgctcgctgcacttttttctctctcatcaggccgggttagggatatcaataaaggtgacgtccaggtcagtattttccgtcagccactcgctcagggcgcgaataccgccgcgctcggtggcatgatggccggcggcataaaaatgcaacccttgctcacgggcggaatggatggtctgctcagacacttcgccggtaataaaggcatcgacgccaaagcgggccgcgctatcgataaagctctggccgccgccggtacaccaggcgacgcgggtgactttgtccggcccggtatcgccgcaccacagcggtttacgtcccaatcgcgcttcaatccacgatgccagttccagcccggataccggcatagacagctcgccccacggcaccaatggttcgatttcccccatcacattgatcccaagcagttgcgccagttgggcgttattgcccagttccggatgcgcatccagcggtaaatgccagccataaagattgatatcgttggccagcaacgttttcagccgattgcgcttcatgccgcggatcacaggcgactcgcctttccagaagtagccgtgatgcacaatcaccgcatccgcctgcagacgcacggcttcatcaagcagcgtctggctggcggtcacgccggtgacgatttttcgcaccgtctcccgcccttcgacctgcaggccattcggggcgtaatcactgatggctgcgctattcagtttttcgttaattaattgttccagttcgctatttttcattgccgctccatcagaaaatcagtttgtacaaacctataacataaccacatccgcccgagtcgtcgatagcgacgccaaagggtccatttcagccattcgcataatcgcccaaattgcctcttccctcaccgcgcattagtgtatatttatgcacttataaagcatattaaataaccagaaagccatttaggccatgaataacaccgcacaaacgctattcatgcagaaagatcgactttcgttttacggccaggaaatgaacgttacatgaacagacaaacttcacagccacgggcgatttattacgtcgttgcgctgcaaatatgggaatacttcagtttttacggcatgcgggcgctgttaatcctgtacctcaccaaccagctcaagtacgacgataaccacgcttataccctgtttagcgcctactgctccctggtctatgtcacccctattctcggcggcttcctcgccgacaaactgctcggtaaccgcatggcggtgatgctcggggcgctactcatggctatcggtcacctggtgctcggcgccagcgaaatcgcccccaccttcctctatttatcgctggcgattatcgtttgcggttacgggctgtttaaatccaacgtcagctgcctgcttggcgaactgtatgagccgaccgatccgcgccgcgatggcggcttctcgctgatgtacgccgcgggaaatattggttcgatcatcgcacctatcgcctgcggctacgtgcaggaagagtacagctgggcgatgggctttgcgctggcggcagtcggtatgattgccggtctggtgatcttcctctgcggcggtcgccacttccgccataccaccggcgttaaccgcgaggcgctatgcgcgcggaccttcctcctgccgaactggggctggctgctggtattgctggtggcgacgccgctgttgattaccgtgctgttctggcaggagtggtcggtgtatgcgctgatcgtcgcgacggtgattggcctggcggtactggcgcgtatttacctgcgcgcgcagaacgacaaacagcgtaaagagctgcgtctgattatcgtcctcaccggttttagcctgctgttctgggccttcgcccagcagggcggcagctccatcagcctgtatatcgaccgtttcgtgaatcgccacgtcatgagctatgaagtaccaaccgcgatgttccagtcggttaacgcctttgcggtgatgctctgcggtatggtgctggcatggctggttaaagagaacatcaagggcaaccgcaccgtgcgtatctgggggaaattcgccctcggtctggggctaatgagcgccgggttctgcattctgaccttgagcgcccgctggtcagccgcgtatggccactcctccatgccgctgatggtactggggctggcggtgatgggcttcgccgaactgtttatcgacccggttgcgatgtcgcaaatcacccggatcgaaatccccggcgtcaccggggtgctgaccggtatctatatgctgctttccggggcgatcgccaactatctggccggcgtcatcgccgaccagacgtcgcaggcgtcgtttgatgccgcgggcgcggttaactattcgattgaagcctacatcgacgtcttcagccagatcacctggggcgcgctggcctgcgtcggcctggtgctggtcatctggctgtatcactccatgaaggtcaaaacccgccaactggcggttgaataaaacctatctggcggcttcccaggccgccagcgtctccagccgcgcctgcttatggtcaaccagcgggcgcggatacctcagcgttaccccctgtttatccgcccacagccacggctgatgcagcgctttctctggcacttcagtcagttccggcagccagcggcgaataaactcgccctgcttatcaaatttctctccctgggtcgtcggattgaaaatacgaaaataaggggctgcatcggtaccggtcgacgccgcccactgccagccgccgttgttggccgccaaatcgccgtcgatcagttggctcatgaaatagcgctctccttgccgccagtcgaggcgcaggtctttcgccaggaagctggcgacaatcatccgcagacggttgtgcatccagccagtggcgttaagctgccgcatggcggcatcgacgatggggaaaccggtttgcccctgttgccaggcccgcagttcatcctcattgctgcgccaggcgactttgtcggtccaggcgacaaagggccgacctttacacaatttcgggtagtaaaccatcagatgacgatagaactcgcgccagataatctcgttcagccagcttgcgcccgcttcgccatccagcgcgccgggctgctcccgtaacaagcgatgcaggcactggcgcggcgacaatacgccgaccgcgagacacggcgatagcctgctggttccctctatcgccggaaaatcgcgctgctggtcgtaatccctcgccggctgctggcaaaatgcgcgcaatcgagccagcgccgttttttcatccgccgcgaacagcgccgcgtcgaacggcgtttgcggatagccgagctctggcagcggcggcgcctgccgggtggctgactggcgtggtttcggcgccgccacgcactccggtagcccttcacgcaggcggcggataaaggcatttttaaacggcgtaaaaactttatacatctcacgattgccggtcatcacgctgcccggcggcaacagcacgctgtcatcaaacccctggcaggtgacttctttcaggattttctcgacgtcggcgtcgcgctggcgctcattaaactcatactgatagttataaaatagatggctaacctggtgctgtttacaaaagcgcgtcagcagctcgatgctggcggcgaaattgtccgcttcttctaccagcagcggaataccgcgttccgctaatgccgcatgcaagctgcgtaaatggctggcgataaaggccgcctggcgcggcgccatatgatgttggcgccactgctctggcgtggggatatacagcgccagcacctgcgcctgcggatcgcggcaggcggcggccagcgccagattatcgtgaaggcgtaaatccatgcgaaaccagaccaaatgggtggccataaaactcctcactctccgtaagcaaaactcatcactcaggccggcaaaatagcgcgctgcggtaaaatacgcacctgcgaattctgccacggcgcgtgaaagctaagtgtagacagcagacgaaaaaaaaccgccggtcgtcaaccggcggtttttatattcgtcgcagcagcgtggattagtagaagtcgtgcgcggctttttccgcctgcgccatccataccggctgttcactggtttttgcccatacgcgatacagccagctgtagtaacgggcgcgatctttccagaacagcatcaccggcagcgcagcgaccccggccacgacggcgaaagcgcgacgcatcaggataatgtgtgcaggataagctttgtacaacgccataatttctctcccctttgtcaggccggcaagcaacgccggtaaatgtcacaatgtttgtctgcacaaatagtaccgcgctggttgtaatttcactactcatccgaccactaaaaagcatttatttatacttaatttacattcaagacgtaacttagttacaagaaagttaaattaatactaaccattagttaaattgtgcctttggccatttttatactttttttacaccgcccgcggcgatttttgcgaaatctttgcgccgaaattcctaccctctcggtatatcaataagagacacacccggaggtggaaagtgactacaggcatcattgccggcgtaacgctggtgttcctgctgctggcgtatctggtctatgccctgatacatgcggaggcgttctgatggccgcgcaagggttcttacttatcgccagcttcctgctggtactgctggtgctggcgcggccactcggttcgctgctggcgaaaatgatcaacgacgtcccgcttccagggcttgccggcgttgagcgcggtatctggcggctggcggggattcgcagccaggagatggactggcggcagtacttgatcgccattgtgctgtttaacgccattggtctcgcggcgctgatggcgctgctgatgtgccagggttggctgccgttcaatccgcagcacttccccaacctgtcctgggatttagcgttgaataccgcggtcagcttcgtcagcaacaccaactggcaggcctatgccggggaaaccaccatgagctatctcagccagatggtgggcctggcggtacaaaacttcctgtcggccgctgccggtattgccgttatcttcgtgctgacccgcgcctgggcgcgacagaaagtcagcaccctcggtaacgcctgggttgacctgacccgcattacgctgtggctgctactgccttgtgctctgctgatcgcgttgttctttgtgcaacagggcgtgccgcagaacctgcaggcttatcagccgttcaccagcctggaaggcgttcgccaatggttgccgatggggccggtcgcctcacaggaagcgattaaaatgctcggtaccaacggcggcggtttcttcaatgccaactcatcgcatccgtttgagaacccgacggcgttaaccaacctggtgcagatgctggcgatcttcttgatcccggcggcgctatgttttgcctttggcgaagcagtcggcgatcgtcgtcaggggcgcgccatcctgtgggcgatggcgctgattttcgtggtctgcgtggcggtggtgatgtgggcggaaacccgcggaaatccgcatctgctcagtcttggcgccgacagtagcctgaatatggaagggaaagagagccgctttggcatcctcgccagcagtctgtttgcggtagtcactactgcggcctcctgcggcgcggtcaacgcgatgcatgactccttcaccgcgctgggcggtatggtgccgatgtggttgatgcagattggcgaggtggtcttcggcggcgtgggctccgggctgtacggcatgttgctgttcgtcatgctggcggtatttatcgccgggctgatgattggccgcacgccggaatatctcggcaagaaaatcgatgtgcgcgaaatgaaaatgatcgcgctggcgattctggtgaccccgacgctggtattactcggcaccgcgctggcgatgatgaccgaagctggacgcagcgccatgttgaatcctggaccgcacggctttagcgaagtgttgtacgccgtcacctcggcggccaacaacaacggcagcgccttcggcggcttaagcgccggaacgacattctggaacctgctgctggcgttctgcatgctggtgggccgcttcggggtgatcatcccggtgatggcgattgccgggtcgctggtgaataagaaaattcagcccgccagctccggcacgctcgccacccacgatgcgctgtttatcggcctgcttatcggcaccgtcctgctggtcggcgccctgacctttatccccgcactggcgctcggcccggtggcggaacacttctctttactttaagcgatgcggagcagcctgttatgagtcgcaaacaattagccctgctggagccgacgctagtgcgtcaggcgctgctggatgcggtgaaaaaactcagcccctcggtgcagtggcgtaacccggtgatgtttatcgtctggatcggcagcgtgctgaccaccctgctggcgatggccatggccgggggtatctcgcgggtcacgccggctttaccgccgccgtcagcctgtggttatggtttaccgtactgttcgccaacttcgccgaagccatggccgaaggacgtagcaaagcgcaagccaacagcctgaaaggggtgaagaaaaccgctttcgcccgtaagctgcgcgcgccccagcacgatgctccgatggatcacgtcccggcggaagagttacgcaaaggcgatatcgtgctggtcgaagctggcgacattatcccctgcgacggcgaagtgatcgaaggcggcgcttcggtagatgaaagcgccatcaccggggaatccgcgccggtgatccgcgagtccggcggcgatttcgcctcggtcaccggcggcacccggatcctctctgactggctggtgatccgctgcagcgtcaaccctggcgaaaccttcctcgaccggatgatcgccatggttgaaggcgcgcagcgccgtaagaccccaaacgaaatcgcactgacgatcctgctgatcgccctgacgctggtgttcctgctggccaccgccaccatctggccattctcggcgtggagcggtaatgcggttagcgttaccgtgctggtcgcgctgctggtgtgtctgatcccgaccaccatcggcggcctgctctccgctatcggcgtcgccgggatgagccggatgctcggcgccaacgttatcgccaccagcggccgcgcggtggaagccgccggcgatgtcgacgtactgttgctggataaaaccggcaccatcaccctcggcaaccgtcaggcctcggctttcctgccggcgcgcggcgtcgaagagcgcgtgctggctgatgccgcacagctttcgtcgctggcggatgaaacgccggaaggccgcagcatcgtggtgctggcgaaacagcgctttaatctgcgcgaacgcgacctgcagtcgctgcacgccacatttgtcccctttaccgcccaaactcgtatgagcggtatcaacatcgaccaacgcatgatccgtaaagggtcagtggacgcgattcgccgccatatcgaagctaacggcggccacttcccggccgatgtcgataagcaggtagaagaggtcgcccgccaggggccacgccgctggtggtggcggagggcgaacgcgttctgggcattatttcgctcaaagatatcgtcaaaggcggcattaaagagcgtttcgcccagctgcgtaaaatgggcattaaaacggtgatgatcaccggtgataaccgcctgaccgctgccgccatcgccgccgaagcgggggttgatgattttctggccgaagcgacgccggaagccaagctggcgctgattcgccagtatcagtcggaaggacggctggtggcgatgaccggcgacggtaccaacgacgccccggcgctggcgcaggctgatgtggcggtcgcgatgaactccggtacccaagcggcgaaagaggcgggcaacatggtggatctcgattcaaacccgaccaagctgattgaagtggtgcatatcggtaaacagatgctgatgacccgtgggtcgttaaccacgttcagtatcgccaacgacgtcgccaagtatttcgcgattatcccggccgccttcgccgccgcctatccgcaactggcgatgctgaacgtgatgcatctgcactcgccctcttcggcgatcatgagcgcggttattttcaacgccctgattatcgtctgcttgatcccgctggcgctgaagggcgtgagctatcgtccgctgtcggcatcggcgatgctgcgccgcaacctgtgggtttacggcctcggcgggctgatcgtgccttttgtcggtattaaagccatcgacctgttgctgaccctgaccggtctggtgtgaggaaattaccatgtcattgattcgtccagcacttgtgctatttattctgttaaccctgctcactggcggcctgtacccattactgactaccgccttagggcagtggtggttcccgcagcaggctaacggctcgctgctccagatcgacggcgaggtgcgcggctccgctctgatagggcagaactttaccgccgccggttatttccacggccgcccttccgcgacggcagaagtggcggataatccgctggcctccggtggcagtaacctggcggtcagcaatccggcgctggataaagcgattagcgaacgggtacaggcgttacgcgccgcgaacccgcaagctaacccaacggtgccggtcgagctggttaccgcgtcggccagcgggctggataacaacctgacccctgccgcggcgctgtggcaggtaccgcgcgtcgccaaagcgcgcaatctcagcgatgcgcaggtgaaacagttagtggatcaggcgacgcaaaaaccgttgctcagttttctcggtcaacctgtggtaaatatactgcaactgaatatggcgctggatgccctaaaggattaattaatgagtgacgagccgctgcgcccggaccccgaccgtctgctgcaacaaaccgctgcgccgcatcgcggcaagctgaaggtgtttttcggcgcctgcgccggggtgggcaaaacctgggcaatgctggcggaagcgcagcggctgcgcgctcaggggctggatattctgatcggcgtggcggaaacccacggccgcaaagataccgccgccatgctggaggggcttagcaccctcccgcaaaagcgcatttcccatcgcggacgctacgtccatgagtttgaccttgatgccgcgctggcccgccgcccggcgctgatcctggtagacgaactggcgcatagcaacgcgccgggttcgcgccacccgaaacgctggcaggacgtcgaagaactgctcgaagccggtatcgacgtcttcaccaccgtcaacgtccagcatcttgaaagcctcaatgatgtggtcagcggtattaccggcgtgcaggtacgcgaaaccgtccccgaccccttctttgacgccgccgatgatgtagttctggtggatttgccgccggacgatctgcgccagcgcctgaatgagggcaaggtgtacatcggcggccaggccgaacgcgccatcgaaaactttttccgcaaaggtaacctgatcgccctgcgcgaacttgcgctgcgtcgtaccgccgaccgggtagatgaacaaatgcgcgcctggcgcgaccgccagggcaggaaaaagtctggcacacccgcgacgccattctgctgtgcatcggccacaacaccggcagcgaaaaactggttcgcgccgccgcccggctggcggccaggctcggcagcgtctggcacgcggtctatgtagaaacgcccgcactgcaccgtctgccggaggccaggcggcgggcgatcctcgccgcgttgaagctggcgcaagagttaggcgccgaaaccgcaacgctctccgacccatcggaagaaaaagcggtgctgcattacgctcgcgagcacaacctcggcaaaatagtgattggccgccagggagagcgccgctggtgggaacgagctgggtttgccgaccgtctggcgcgtcgcgccccggatctcgatctggtggtgatcgcgctggatgaaaaaccggcctccctacccgcccgcgcaaacgacaaccgtacggcgctcgacaaatggcgccagcagttgaagggctgtctgttggctgtggcgctatgcgccattatcaccgtggttgccatgcagtggctaatggcctttgaagccgccaacctggtgatgctctatctactgggcgtggtgattatcgccctgctgtatggccgctggccatcggtgctggcgacctttatcaacgtcattagcttcgatctcttttttgtcgcccctcgcggcacgctggcggtttccgatgtccagtatctgctgacgttcggcgtgatgctgaccgttggtctggtgatcggcaacctgaccgccgggatgcgttaccaggcgcgggtggcgcgttatcgcgagcggcgtacccgccacctgtatgaaatgtcaaaagcgctggcggtcggtcgcagccgcgaagatatcgccgccaccagcgaacgctttattacctccacctttcaggcccgcagccaactattgctgcctgatgagaacgggcaactgtacccgatgacccagcaatccggcgttttctcgtgggatgatgcgattgcccgctggagtttcgataagggccagccagccggagccggtaccgacactctccctggcgtgccgtatcaaattctgccgctacaaagcgccgcccgcacctgggggctgctgctggtcgaaccggaaaatctgcgtcaactgatgatccccgaacagcaacggctgctggaaacctttaccctgctggtggccagcgcccttgagcgtctgaccctgaccgccagcgaagagcaggcgcgcttgaccagcgaacgcgaaagcctgcgcaactcactactggccgccctctcccacgatctgcggacgccgctgacgatactgttcggccaggcggagatcctgactctcgatctggccagcgaaggttcgaagcacgcgccgcaggccaacgaaattcgccagcacgtactcaacaccacccggctggtgaataatttactggatatggcgcgtattcagtccggcggctttaatctgcataaagagtggttaaccctcgaagagatcgtcggtagcgccctacgtatgctggagccagggcttggcggccagcacatccagctgtcgctgccggacccgctactgctggtccacgtagatggcccgctgtttgagcgggtgctgatcaacctgctggaaaacgcgcataaatacgccggcgcgcaggcgcagattggcattcacgccgaagcggatatgcagcagttgatcattgaagtctgggataatggtccggggatcccagcaggccaggaacaggctatctttgataaattcgcgcgtggtaataaagagtcggctatccccggcgtcggtctggggctggcgatttgccaggcgattgtcgaggtacacgagggtagcattaccgccagcaaccgtccggaaggcggcgcctgtttccgtgttacactgccgcgagaagcgccccagaactggaagagttaaccgaggaaatgtgattaacgttttaatcatcgaagacgaacatgctatccgccgctttctgcgcaccgcgctggaagccgacggtatgcgcgtatatgaagccgaaaccctgcagcgtggactcatcgaagccgccacccgcaaaccggatttagcgatcctcgatcttggcctgccggacggtgacggtaatgattttatccgcgaagtccgccagtggagccagatgccgattatcgtgctgtcggcgcgcagcgaagagcatgacaaaatcgccgcccttgacgccggcgccgatgactacctcagtaaaccgtttggcataggcgaactgcaggcgcggctgcgcgtcgcgctgcgccgtcacggtagcgcgcaggccgatgagccggtggtgcgctttgccgatattagcgtcgacatccccgcccgtcgtatcgtgcgcggcagtgaagaaattcatctgacgcccatcgagtttcgcctgctggcggcgctactgaacaatccgggcaaagtgcttacccagcgccagcttctgaatcaggtatggggcctaacgccgtggagcacagtcactatttgcggatttatatggggcacttacggcaaaaactggaggctgacccagcgcggccgcagcatctgctgaccgaaaccggtattggctatcgctttatgccttgaagggaacaaatcaatgaccccggcggtcggttaacgccgccggggtaagcaggatcaggcgtttttcagcacttcgctgacaatctctaccgcttctttttcaatcagcttgcgatgttcttcgccaaggaagctctcgcagtagattttgtaggcgtcttcggtgcctgacggacgggccgcgaaccagccgttgtcggtcatcactttcagcccgccgatagaagcgccgttacccggcgccgcggtcagacgcgcggtgatcggatcgcccgccagcgtgtcagcgctaaccatttccggcgacagcttagacagcgccgctttctgtgcggaagtggccgatgcctgcagacggttgtagctcggtgcgccaaagcgttccgccagctcattatagtgttcctgcgggttcttaccggttactgcggtgatttccgccgccagcaggcacatgatgataccgtctttatcggtggaccacggcgtgccgtcgaaacgcaggaatgatgcaccggcgctctcttcaccgccgaagccgaagctgccgtcgaacagaccgtcaacaaaccatttaaaacctaccggcacttccaccagcttacggcccagatcgttaaccacgcggtcaatcatcgccgaggaaaccagcgttttaccaacggcaacgtctttaccccactgcggacgatgctggaaaaggtagttgatagccaccgccagatagtggttagggttcatcaggccagccggggtcacgataccgtgacggtcgtaatccggatcgttggcgaaggccagatcgaacttatcgcgcagcgccagcagacccgccatcgcacactcggaggagcagtccatgcggatcgcaccatctttatcaaggtgcataaagcggaacgtctgatcgacctgatcgttaacgatggtcagatccagcttgtagtgctcgccgatgcgtttccagtattcgatacccgaaccgcccagcggatcgacgcccagtttcaggcccgctttctgaatcgccgccatatcgacgatatccgccagcccttcaataaacggctgtaccaagtcctgttctttcacgtggccggaagccagcgcggcgtcgagagaaatacgcttcacaccctgcagaccggcggccagcagttcattagcacggttctccaccactttagtcacgttggtatcagccgggccgccgtttggcgggttgtacttgataccgccatcttccggcgggttgtgcgacggggtgatgacgataccatccgccagcgggccgccttttttgttatgcaccagaatcgcgttggaaaccgccggcgtcggggtgaaaccgttgttttcctgaacgatcacatcaacaccgttcgccgccagcacttccagcacggaaatgaaggccggttcggataaagcgtgggtatccttaccaacgtagcacgggccggtgatgccgtttttcgcgcggttttccgcaatcgcctgcgcaatcgccagaatatgctgctcattgaaattgtggcgccctgcgctaccgcgatggccggaggtgccgaacttaaccgcatgctccgcattgcccgcttccggcttcagcacatagtactgagcggtcagctgggcgacgttaatcaaatcactctgttgtgccggctgacccgcacgtttatcgattgccattgcctgatccttctggtgcaaagtttaattaactagatcgtgccgcataccttttcaatcagctccgcagggaactgcattgattgcatgatgtgttcgatcatgctgcatttacggccggtattagtattggtgataacccaccacggcgtaccaggaacctgtttcggtttggtctggttaccgcttttcagcagcgtccgtgagtcttcggcgaagtatacgcgggtgcgtccgtgcagagactcagtggcttctgaaaatgccttactgtctaacgagtaaagcgtagtcaataccagcatgaagcggttaaccgcgcgcttttgttcagcgtattcgtcagataacagcagctcgcgcatggcgcggactttatctttaaccgggttggccggcttcgcttcgacgactggcgccgccgcaggagcagccgccggcgcggctttcgccgctggcgcgccagatgcaggctgagaaacggcggaaaatttcagcatgcgccgtaaaatgtcggatgcgctctcgccgatatgcagagtgtggctggcaatatagcggtagagctcatcatcaacttcgattgttttcatcttaatccagtgcgatttctttgtttctgaatacaagtcgtcgggattaactatcctttgtctttcacactacagcacaaaaggcatcagatagaggacaaatcccaaccgcgaatagcgtcaaaccaggatggcggtaaaactcagaatgcttccgggtcttgcagcctaatggcagaatgtccaacataataccctaacccgacggagcgaaaaaaagaactttgccatgaaattaaatagccgagcgcaatctgcacaaaacccgcacaataaatccccaatcgtcctggtacacggcctgttcggcagcctggacaaccttgggatcctcgcccgcgatctggtcgccgactacgatatattgcaggtcgatatgcgcaaccacggcttatcgccgcgttcaccggagatgacctaccgcgcgatggcgcaggatctgctcgataccctcgacgatcatcagatcgagaaagcgacctttatcggccattcgatgggggcaaagcggtgatggcgctgaccgcgctggcgccggatcgcatcgccgggttggtggcgattgacattgcgccggtggcttatcacgtccgccgtcatgatgagatcttcgcggcgattaacgccgtcagcgaatccgccgccagcacccgccagcaggcggcgcaggtaatgcgcgagcatataaatgaagaaggcgtcattcagtttctgctgaaatcctttgtcgacggcgcgtggcgcttcaacgttccggtgctgtgggatcaatacccgcatattgtcggctgggaaaccgtgcccgcctggccgcacccggcgcaatttattcccggcggcaactcaccttatgtgaccgatgaataccgggacgtgctgctggcgcagttcccgcaggcccgcgcccacgtcattgccggtgccggacactgggtgcatgcggaaaaacccgaggcggttttacgcgcaattcgccgttatctgagcacaattgaagcctgagtggctaaaaaacgcccgaccgcgcgacataatgcccgcggtcgttggcgcagcggttcgcctgatgtattatggcgcgctatctgcgccggctatagcccggcagcttgtttccccgaagtcactctgaatcatggcaaaagaacaaacggaccgaacgacattagatttgttcgcaaatgagcgtcgcccgggtagaccgaaaaccaatccgctttcgcgcgatgaacaactgcgcatcaacaaacgtaatcagctcaaacgcgataaggttcgtggcttgaagcgcgttgagttgaagctcaacgccgatgcggtcgacgcgcttaatgagctggcggaagcccgcaacatgagccgcagcgatcttatcgaagagatgctgatgcaccaactggcctgcctgcgtaaccagggcgaagtctgaaaaacgcaaaaaaatcgctttcatgtagcagagtgtgcaccaggacgttattgctgtttccgcgcccttccctgttctgctatgattgccgttaactgtaggcataatgccactaccacatcattaagtttcaagaggttattttactcatggcaatcatcggcatcttttttggcagcgacaccggcaacaccgaaaatattgcaaaaatgatccaaaagcagctcggtaaagacgttgctgatgttcacgacattgccaagagcagcaaagaagatctggaaagccacgatattctgctgctcggcatcccaacctggtactacggcgaagcgcagtgcgactgggacgacttcttcccgacgctggaagagatcgacttcaacggtaagctggtagccgtctttggctgcggcgaccaggaagattacgcagaatacttctgtgatgcgctgggcaccattcgtgacatcattgaaccgcgcggcgcaaccatcgttggccactggccgaccgcgggctaccacttcgaagcgtctaaaggcctggcggacgacgatcacttcgtcggtctggcgattgatgaagaccgtcagccggaactgaccaacgagcgcgttgagaagtgggtgaagcagatttccgaagagctgcatctggaagaaatcaaaaacgcctaagaatcaaacagcgcagctattaagctgcgctgtattaatagataaaagcaatcaaactaatagctacaagtttttaacttttcatcacatatctgtacaatgtcctctgattccacgaggtcacgtgacacagtttgtagctggtaattcgtttttgacagcttacaaggcgcgatggttgcagttttcatttcagagtagcagctctataatgagacgcattacatcgggtgattctctgtattgcttccctttgaaggaagccgatctttagcaacaggacagattccgcatgactgacaacaatatcgcattaaagaaggctggcctgaaagtcacacttccccgactgaaaattctggaagtgttgcaggaaccggataaccatcacgtcagtgcggaagatttatataaacgcctgatcgatatgggtgaagagattggtctggctaccgtttaccgcgtgctgaaccagttcgacgatgcaggcatcgtgactcgtcacaacttcgaaggcggtaaatccgtattcgagctgactcagcagcaccaccacgatcacctgatttgcctcgattgcggcaaagtgatcgagttcagcgatgattctatcgaatcccgccaacgtgaaattgctgcgcaacacggcatccgcttaaccaaccacagcctgtacctctacggccactgtgcggaaggcgactgccgcgaagatgaacatgcccacgatgcggtgaataaataatttctcgtctcgtaagtagtgaaaagccaacctgaaggttggcttttttatgggcgaaatccccctgcatgcctattctgtcagagcctatcgccttgtacggagagtcaatatggaactgcgccagctacgctattttgtccgcatcgtggaaaccggcagtatgggccgcgccgcgctcgatctgaatattggcgtctctgcgctcagccagcaaatggcgcgtctggaaaatgaactcgctatccgcctgctgcaacggacttcgcgtggcgttatgcccaccagcgccggcctcgccttttactcacaggcgcaactggcgctgcgccatgctgacgatgccattctcgccgcgcgtgaagctcgcctttccggtcacgtcagcgtcggtatggcgccaagcaccgcttctgtacttggcgtaccttttatcaacgccatgcgcgaaagctacgccgacgtccgcctgcacctggtggagagcctctccggcaatctggaacggatgatcaatacccgccagctcgatttagccatcgtcttccagaaagagaagatcctgcgctggagcgcccgacccattcttgaggaacgtctgttcctgattggcgcccatgacgtgctggcgccgctgcccggcgatagcatctctccgaaccaactggccgctatcccgctgattatgccaagccagggcatggcctgcgcggcaggctggacgctatttgccaggagcacgccatcaacgttgacgtggtggctgaaatcgatggcctggccctgctgatgcgcgccgtccgtgatggcctcggcgccacgctgcagccgggcgcggcgatttctcatctcgacagcgaggcgctaagagtgatcggcgtcgacaatccggtactaagccgtcctaattttctggtcagtctctcagatgatgaactcaccccggcaggccttgccgcgcgtgtgatactgaccaaagtcatgcgtcagctcgtggaaactggctgctggccgggcgccagcctttacacttactaaacccctctttagctttacgccatagcgcctgtcgccccgcaccttacatttccattacaaatttaacaattagtcaaagcgtaatggagccgataatggtggatgtactggtgattggcggcggcaacgccgcgttatgcgccgccttaaccgcccgggaagcaggcgcatccgtactgctgctggaggccgcgccgcgggaatggcgtggcggtaactctcagcacacgcgtaatctgcgttgtatgcacgatgcgccgcaggatgtcttagtcgacagctacccggaagaagaatactggcaggacctgctgcgcgtgaccggggcaacaccaacgaagcgctggctcgcctggtgatccgcacctcgtcgcactgccgggactggatgcgccgtcatggcgttaattttcaaccgcccttatccggcgccctgcacgtcgcccgcacaaacgccttttttatgggcggcggtaaagctctggtcaatgcctattaccgcagcgccgagcggatgggcgtacagatccgctataacaccccggtacaggcgcttgaattacgtgatggcgaattcgtcgccgcgctggcgggcactgagcggatcgccgcgaaaacctgcgtgctcgccgccggcggttttgaatctaaccgcgagtggctgcgcgaagcctgggggcaaaatgagcgcggcgaatggcctgccgacaactttctcatccgcggcacccgttttaaccagggagtgctgctcaaatttatgatcgacgccggagccgatatcatcggcgatccttcacagtcgcactgcgtcgccattgacgcccgggcgccgctctatgacggcggcatctgtacccgcgtcgactgcgtgtcgctggggtggtggtgaaccgcgatgctgagcgcttttatgatgaaggggaagatttctggcccaaacgttacgccatctggggccgtctggtcgcccaccagccggggcaaatcggctattcgatcatcgacagtaaagctgttggacagtttatgccgcccgtttttccgggcgcccaggccaataccatcgtggaactggcccgccaattggggctggacggcgaacgtttgtcacagaccatcgccagctacaatgccgcctgtacgccaggccagttcgaccatacccgtcttgataactgcgccacctccggcctgacgccgccaaaaacccactgggcgcggcctatcgatacgccgccttattacggttatgccctacgtccggggatcaccttcacctacctcgggctgtacgtcaatcaacacgccgccgtccactttgccggtaagccgagccgcaacctgtttgtcgccggcgaaatgatggccggcaacgtgctgggcaaaggctataccgccggcgtaggtatgtcgatcggtaccacattcggccgcattgccggtcagcaagccgccctggcggcgcagcaggagaaacatcatgaagtcgcttgaaaagctgatcatcgaggcgcaaatcatcaccgagccggaggcggaagtcgaacgggtgatgcaggtctgtaacgcctgccgctattgcgaagggttttgcgccgtgttccctgccatgacccagcgtctggcattcggcaaggcggatattaactatctggcgaacctatgccacaactgcggcgcctgtctgcacgcctgtcagtatgccctccgcacgagtttgcgattaatgttcccaaagcgatggcggaagtgcggctggaaacctatcaatattacgcccaacccgccgctttcggcagtttatatcgccgtgcggggatcgccacggtgctggtgctggtcgcgggtcttgtcctgtttctgctgctggcgatggggcttaaaggttcgctgctgcacccgccgctggccggtgatttctaccagattttcccgcataacctgctggcatggatgttcggttcggttttcattgccgccatcggtttactgatgagcggggtgattcgtttctggcgcgagatctcacctggccaaccgcaagctggtgatatcgccagggcctcacatgatgcgctgacgttgaaatatctcgacggcggacacggtaaaggctgtaacgaggccgatgacgccttcacgttgatgcgccgccgttttcaccacttcaccttttacggttttatgctctgtttcgccgccacgctggtggctacgggctatcactatctcgccggttgggaggcgccctacccgttctttagcgtaccggtgctgcttggcacgctcggcggcgtcgggctgctggtaggccctgcgggtttgctatggctaaacctgcgccgctcgccgctgcacggcgacgcgcggcaaaaaccgatggatcgcgcttttatcctgctgttgctgctgaccagttttaccgggctcgcgctactggcgggccgggacacctcgtggatgggcattctgctcgctatccatctcggggtggtgatggcgctgtttttaacgctgccttacggaaaatttgcccacggattttatcgctgtgcggcgttactcaagtgggcgattgagaagcggcgcggaaaacaggcggcagtcgcagacgactgacccgctccctcttacctctataacaacaagataaagacaatggagagcaaaccctatgacccaaccaacctcgcgcgccggtaccttcggcgcaattctccgcgtaaccagcggtaattttctcgagcaatttgacttctttctgtttggtttctatgccacctatatcgccagaaccttctttccggcagagagcgagttcgcggcgttgatgctcacctttgccgtgtttggttcgggcttcctgatgcgccccatcggtgcggtggtattaggagcttatatcgacaggatcggtcgccgcaaagggctgatggtcaccctggcgattatgggctgcggcacgttactgattgcgctggtgccgggctaccaaaccatcggcgtgctggcgccggtgctggtattaattggccgtttgttgcaaggattctcggccggggtcgagctcggcggcgtatcggtctatctgtcggaaatcgccaaaccggggaaaaaggggttctataccagttggcagtccgccagccagcaggtcgccatcgtcatggcggcgctgattggctacgcgctgaacgagacgctgggtcacgacaagattgcagaatggggctggcgcattcccttctttatcggctgcctgattatcccactgattttcgtgctccggcgttcgctgcaggagaccgaagcgtttctgcagcgtaagcatcgtcccgataccaaagagatactaaccactattgttaaaaactggcgcatcatcagcgcgggcaccttactggtggcgatgaccaccaccaccttttattttattaccgtctataccccaacttacggcagagcggtactgcatctgagcgcacgcgacagcttgctggtaacgatgctggtcggtatctctaactttatctggttgccgattggcggagcgctgtcagacaaaataggccgtcgtccggtgctgatgggaattaccgtcctggcgctgctgactacctggccggtgatgcaatggctcaccgccgcgccggatttcacccgcatgacgctggtgctgctgtggttctcgttcttctttggtatgtataacggcgcaatggtggcggcgctaacggaagtgatgccggtctacgttcgcaccgtgggcttttcgctggcgtttagcctcgccaccgctatcttcggcgggctgacgccggctatctctaccgcgctggtcgaaatcaccggcgataagagcgcgccgggctggtggctgatgtgcgcggcgctatgcggattcgccgccaccgccatgctgttcatgcgtctgagccgcggttatcagccagcggaaataccgcgttaaaatagcgacgggcggagtgtacgctccgcccgtttacgcttaactgtccactttacttagtggtgttattactgcgaatctcctgccagattttatcgcagcgcgctttgaccgcctggtcattaccggtgcgcgtcgcctgaatacaggcctgataatccagcactctgacgctctcctgcgtcgcaaactgctgatgcggtttctcttccttcaggacgttgagtacgctctgacaggcttcaatcttgtccggattaccttccgccgtgttgatacaggcgctataggcatctttcaatttggaatcttctttcggcgctggcgatggcgcgcaggcaaccagacccgatgccatgatggcgatgagcagcaactttttcatagttaatctcccggaggggcggcaggctcacgcccgccgcgcaggcatcagaaaatggtgaacggcgcgataaccataaacttcacatcacgctcatcctggaagatgttgccgtagccaccgctccagcttgggatgtcggagtggttgtcgtattgcgtgaagtgcagtttgaacatcgttcctttcgcccggccttcctgcagggtgtagatagcatccaggctgtaggcggactctttcagacgatagttaggatcgtagtaagcatccggggatgccattctgccaggcttcgcatcccaggcgtaaacataggaagcgccaaacgcccagcccggcatatcccagttcttcatgtcatacatcgcgccgaagaatactgctttctcgccgttggcgttaaagtcggagcggttatcccaccagatatcgagacgaccattagaggaggcataggttggcgtcatacgctgcaggaagtagccctgctgaccatcggctttaacccaggtcccttccagacgcagatccagcacatcggccgctttatagccaaaggtgatcgcctgcagccacgcggtgccatcgtagatgtcgttgacgccgccgtttctgactttatcgcgtgtgccgtagaactgatagctggtactcaacggcgaaccagcgatatcaaatttgtagctggctttagcaaagtactgatcgatatagccctgggcttggccaaatgcggcttccagcaccagatcgtttttaaaatcgtatttcgcgccaacggagtgcagatagtcgaccttggttttcttatcgttctggtagaaatcatccatctcgatatgccacggcgctttatattcgttggtccacatataggagaaactcaacgcgccgttatcgccataatcgaagttggctccggcttccgccccctgataggtaccaggcataaaactccagtgcggcgccagcagcgtttgcccggtcggctggatataacccgcgcgcgcccacgccgggccgaatttaaatttagccgctgctttatacaggctaatcccgctcttatcgccggaataatcttcactgtaggcacggttactggaggagaaggcaatttcgttcgggtggccgctgtcgccgttttccgccatttctatcgcggtgaaggcggcaatatcaatcccgaacatatcagcggcatagccggactggaaatccaggttggcgttccaggtagaatgagaaaggttggtttcatacttatcggtttctacgtttttacggtcgcgctcgcgctgccagtaatagataccgccagttaaggtagaatcatcgataaagcctgctgcgctggcctgtggagccacaacccaacccgacatcgcggtgacggcggcaatagccagcgccagcgtactacgtttgccactaaacgtacgcatgtgcatatcctctttgacgttttaaaattgcgattgccaaaggcagctcgctaaaaaaataaaaaagtactaaaagcggtgcggttaaaagtccgcgaaaccactatggatagactatttttcgtgacgcgaattatcaatctctttcgcagagcaaagcttaagattatgacaaagcgcacataatttatgtctttttgttacagacttacttctcagcttttttaacgataagtcatggttatatcgaaaaaaaattgataggtgccggaagctgaaacggttaaatgtaaatacaccggcaggaagagatggggaattattacggtgttttaataagattaattcgcatcgaaaaaatatcgatttttaattcactgattctgaaataaaaaaacgccgcagtgtgcggcgtttcatgaatacgatgagcattactcgccgattttagcccaggtgtcacgcaggccaacggtgcggttgaagaccagatggccctcggtggcgtagcggctgtcgaggcagaagtaaccttcgcgctcgaactggtatgctttacccgcctgcgcttttgacaggctcggctcggcgaaaccttgcttgatgaccagcgattccgggttcattaccgccaggaagtcatccgccgcgcccgggttcggcacgctaaacagacggtcatagaggcgaatttcaaccggcagcgcgtgcgccgcgctcacccaatggataacgcctttgaccttgcggccatcggccgggtctttactcagggtgtcggcatcgtaagtacagaagatggtagtgatattaccctctgcatctttctcaacgcgttccgctttaatcacgtaggcgttgcgcagacgcacctctttacccagcaccagacgcttgtactgtttgttggcttcttcgcggaagtccgcgcgatcgatccagatctcagcgctgaatggtacctcacggctgcccatttccggcttgttcggatggttaggcatcgccaccatctcacttgcgccctgcggatagttttcgataaccagtttaaccggatcgatcaccgccatcgcgcgcggcgcgttttcattaagatcttcacgaatgcacgactccagcgacgccatctcaatggtgttgtcctgcttggtcacgccgatgcgtttgcagaactcgcggatggattcagcggtatagccgcgacggcgcaaaccggaaatagtcggcatacgcgggtcatcccaaccttccacatgcttttccgtcaccagctgattcagcttacgcttggacatcacggtgtattcgagattcagccgcgagaattcatactgacgcggatgcaccggaatactgatgttgtcgagcacccagtcgtacagacgacggttgtcctggaactcaagggtacacagcgagtgggtgataccttccagcgcatcgctgatgcagtgggtgaagtcgtacatcgggtagatgcaccatttgttgccggtctgatggtgttcggcaaatttaatgcgatacagcaccgggtcacgcatcacgatgaatggcgacgccatgtcgatcttcgcgcgcaggcaagccttaccctcttcaaagccgccggtacgcattttttcgaacagcgcgaggttctcttccacgctgcgatcgcggtacgggctgtttttacccggctctttcagggtaccgcggtattcgcggatctcgtctgcggacagttcgtcaacgtaggccaaacctttgttgatcagttcaaccgcatactgatgcagctgatcgaagtaatcagaggagtagcagacatcgccggaccagtggaaacctaaccactgcacgtcgtttttaatcgactccacgtattcgatatcttctttaaccgggttggtgtcatcgaaacgcagattacattgaccttgataatcctgggcgatgccgaagttcaggcaaatggattttgcatggccaatgtgcaggtaaccgttcggttccggcggaaagcgggtatgaacggtggtgtgcttaccagtagccagatcttcatcgatgatctgacggataaagttagtcgggcgggcttctgcctcactcatcacgggttcctcaaagcgtaaacaacgtataacggcacatgatcttacaagcagggcgcagagacaactattagttacgcaaaatacgtatctgttgttggatatgggggtgtttggtgcaaaaaaaagcggcgcaggtttcgctgcgccgctgaggcaaaactctactcaggagccttacttgcctttaatctcgaacaacggcgtttggccggcgacaacgctgcccgttgcctgaatcaccagcgcgctgtaatcatcgctgttgctgcagacgaccggactgatcatcgagcgggcgttggcgttgaggaacgccagatccatttccaggatcggctcgccggctttcacctgtgcgccctcttcaaccagacgtttaaagcctttgccttccagcgcgacggtatcaatgcccatatggacgacgatttccgcgccgttatcggtttccagacagaacgcgtggttggtgttgaagattttcaccaccgtaccggccgccggcgcgacaacgatgttatcggtcggtttcaccgcgataccgtcaccaacggctttgctggcgaaggcttcatccggtacctgctcaagcacaaccacttcaccggtgatcggggaaaccagcgcttcgacggttttggcgttagcgaccgcctgcggtttggccgcaggagctgcggctggcgcgctgtcagtcgaagcagccgcagcagcaaccggaccacgggcaaccactttcttcatggcgtcgccaacggattccgctttcgcgccaacgatgacctggatggtctgtttgttcagtttcaccacgccggaggcgccgagacgtttacaggcggcatcgttgaccttcgccgagtcgccgacggtcagacgcagacgggtgatacaagcatcaatggctttcaggttatcggtaccgcctacggctgcgatgtagttagtcgccagctgagtcagaccttcttcggtattgctattcgcttcttcagtcacgacgtcgtcagctttatcttcacgacccggcgttttcaggttgaacatgcggataaccgcgctgaacaacaggaagtaaatgaagaagaacaccacgcccatcaccagcagcatccagacgtttttgctggctgccggcaggctgtacatcaacacgtagtcgatagcgcccgcggagaaggagaagcccgcatggatgcccagcgccgttgcgatgaacaggctgataccggtcaggatagcgtgcaggaggtacagcagcggagccaggaacatgaacaggaattccagcggctcggtcacaccggtcaggaacgcggtgatggccacggacagcagcataccgccgaccatcggacggcgctctttcggcgcagccatgtacattgccagcgcggcgcccggcagaccgaacatcatgatcgggaagaagccggacatgaacatccccgcggtgccgtcaccggcatagaagcggttgatgtcgccgtggaagaccgcgcccgcggcgttggtgaactcgccaatctggaaccaggcgatggtgttcagcacctgatgcagaccggttgggatcagcagacggttgatgaaaccgaagataccggaacccagcgcgcccgcagatacgatccattcaccacctgcatgaatagcgtgctgtaccggcggccagacatagccgaagatggcagccagcaccagacagaagaagccggtagcgatcggtacgaagcgtttgccgccgaagaagctcaggaagtctggcagtttaatgccggcccagcggttataaacagcacccgcgaccagaccggtaatgatacccgccagtacacccatgttaatttccgggttaatggtgaccatcgctttggtcatcacgaaataacctaccgcgccggccagcgccgcagaacccgcgttatctttggaccagcttgatgccacgccgatggcgaagatcaacgctaagttgtcaaagattgccccacccgcttgcgcgatgaagggtacgttcagcagatccggttgcccgaatcgcagcagcaatgccgcgaccggcagcactgcgatagggagctgtaaagccctacccagccgctgaaagaaacctaaaatattcatcttattccccctatgagaccccgatgaggctcatttcaaagccacttttttattgtgtaacaaggtcggatttatcacttaccggcaaagtgtgtgaaaaattaattcgtatcgcaaattaaacgggtattttttgtgactataatcaccaaatatcgtattccccctccctttgactggctaacatcgaaaacttattttatcattcaaaaaatcaacacggattgaccccggtcggcgcagttgctgcaatactcttcatagtatgctggcgccaatccgccaggttctaatttaactatagaggtgaagaatgagactgatccccctggtaacagctgaacaagtaggtaaatgggctgcccgtcatatcgttaaccgcattaacgcgttcaaaccgaccgcggaccgtccgttcgtactgggtctgcctaccggtggtacgcctcttaccgcttacaaagcgctggttgaaatgcataaagcaggccaggttagcttcaagcacgttgttaccttcaacatggatgagtatgttggcctgccgaaagagcatccggaaagctatcatagcttcatgcaccgcaatttctttgaccatgttgatattccagctgaaaatatcaacctgctgaatggtaatgcgccggatatcgatgcagaatgccgtcgttatgaagaaaaaatccgctcctacggtaaaatccacctgtttatgggcggcgtaggtaacgatggtcatatcgcgtttaacgaaccggcctcttctctggcgtcccgtacccgtatcaaaaccctgacccatgacacccgcgtggccaactcccgcttcttcgacggtgatgtggatctggtgccgaaatatgcgctgaccgtgggcgtgggtaccctgctggatgcagaagaagtgatgattctggtgctgggccatcagaaagcgctggcgctgcaggcggcggtcgaaggtaacgtcaaccacatgtggaccatcacctgtctgcagctgcatccgaaagcggttgtggtctgcgacgagccgtccacgatggaactgaaagtgaagaccctgaaatatttcaacgaattagaagctgaaaatattaaaggtctgtaatgtagtccgtcccgcgccctggcgtgggaccatctttttctttgtatgcaacgccagaacaatgcgagttgagctggtggggcgtatataccgggggtcgtaatgtatgcattaacccagggccgggtttacaccggtcatgaaattctcgatgaccatgcggtcgttattgccaatggccgtatcgaacgtctctgtccgctggctgatttgccgtctgaaattgagcaacgctcggtcaacggcgcgattgttgcccccggtttcatcgacgtccagctgaacggctgcggcggcgtgcagttcaacgatagtccggatgcggtcaccgtcgaaacgctggaaattatgcagaaagcgaatgagcgttccggctgcaccaacttcctgccgacgctgattacttccagcgatgacctgatgaagcaaggcatccgtgtcatgcgagaatatttgcaaaaacacccgaaccaggcgctgggtctgcatctggaagggccgtggttgaatatcgtcaagaaaggcacccataacccggactacgtgcgtaaaccggacgccgcgctggtcgacttcctgtgcgacaacgccgacgttatcaccaaagtgacgctggcccctgagcgcgtcgagccggaagtgatccgtaaactggtcgccgccggcatcgtggtttcggctggccactctaacgctacgctgaaagaagcgaaaatcggtttccgcgccggtatcacatttgcgacgcacctctataatgccatgccgtatattaccggccgtgaaccgggcctggccggcgccattttcgacgagccggatgtctactgcggtatcatcgttgacggcatgcacgtcgattacgccaacgtgcgtaacgctaaacgcctgaaaggcgataaactgtgcctggtgactgacgccaccgcgccagcaggggctaatattgaccagttcatttttgctggtaaaacaatatactaccgtaatggtctgtgcgtagatgaaaacggcaccctcagcggttcttcgctgaccatgattgaaggggtacgtaacctcgttgaacattgcggcgtggcgttggatgaagtgttgcgtatggcgacgctctacccggcgcgcgcgattggcgtggacaagcagctcggtagcattgcgccgggtatggtcgctaacctgaccgctttcagccgcgattataaaatcatcaagaccatcgttaatggtaacgaggtcgtcactgagtaagtaaaagtatgacagcaggcggacaagctcaaattggtaacgtcgatctggtaaaacagctgaatagcgcggccgtctatcggctgattgaccaacatggtcccatctcgcgcattcagatagcggaacaaagtcagcttgcccctgccagcgtaaccaaaattacgcgtcagcttattgagcgcggcctgatcaaagaagtcgatcagcaggcctccaccggggggcgccgcgccatctctatcatcgcggaaacccgcaatttcaacgccatcggcgtacggcttggccgctatgacgccaccctgaccctctatgatttaagcagtaagacgctggaagaagagcacttcccgctgccggagcgtacccaggaaacgcttgagcacgcgctgctgaatatcatcgccacctttattgaaaattgtcagcgtaaaatccgcgagcttatcgccatttcggtcattctgccggggctggtcgatccggaaagcggcgttatccgctatatgccgcacattcaggtggagaactggggcctggtcgaagcgctggaaaaacgtttcaatgtgacctgttttgtcggccacgatatccgcagcctggcgttggccgagcactattttggcgcaagccaggattgcgaggactctattctggtgcgcgtacaccgcggtaccggcgcgggcattatttccaacgggcgcatttttatcggccgtaacggtaacgtcggcgaaattggccatatccaggttgacccattaggcgaacgctgtcactgcggtaacttcggctgtctggaaaccgtcgccgcgaacgccgctattgagcaccgcgtccgccatctgcttgagcagggttaccaaagccgcattacgcttgatgactgcaatatcaaaaccatctgcaaagcggcaaataaaggtgatgcgctggcctgtgaagtggtcgaatacgttggccgtcatctgggcaaaaccatcgccatcgccatcaacctgtttaatccacaaaaagtggtgattgccggtgaaatcgtcgaggcggaaaaagtgctgctgccggccatcgaaagctgtatcaacggccaggcgctgaaagcgtttcgccacaatctgccggtggtacgctcgacgctcgatcaccgctccgccatcggcgcctttgcgctggtcaagcgtgcgatgctcaatggcatcctgctacagcatttgctggaaagttaatccagctttatagtttcgcctttcgttaatgatgttggactgtccatgaccattcaaaacgtaatttgtgatatcgacggcgtgctgatgcacgataacgtggctgttcccggcgccgctgaatttatcaaacgcatcctggaaaaaggcatgccgctggtgatgctgaccaactatccttcgcaaaccgggcaggacctggccaaccgcttcgccaccgccggtatcgaagtgccggataccgcgttctacacctccgccatggccaccgccgatttcctgcgtcgccaggaaggtaaaaaagcctatgtcgttggcgaaggcgcgctcatccacgagctgtacaaggccggcttcaccatcaccgacgttaaccctgatttcgtcatcgtcggcgagacccgctcctttaactgggaaatgatgcataaagcggctttctttgtcgccaacggcgcgcgcttcattgccaccaatccggatacccacggccgcggctactaccctgcctgtggcgcgctctgcgcggggatcgaaaaaatctccggccgtaaaccgttttatgtcggtaagccaagcccgtggattatccgctccgcgctcaacaaaatgcaggcccactccgagcaaacggtgatcgtcggcgataacctgcgtaccgatatcctcgccggcttccaggcgggccttgagaccattctggtactctccggagtctccacgctggacgatatcgatagcatgccgttccgcccttcgtggatttatccgtcggtcgccgaaatcgacgttttttgagccgaaaccacgtcccaggacgtggttttttatttatagcgctgccaaaaatagattcatctaataaaaatggcttatcgctaaacaatcatcaataaagacgagctaaacatactcatttttcaacatccgacaatcagcattgcactttttacttttcagccggtaaatctcttgcgccccactctcctttacggcattttctttaacacgcactaagaccttgcaagagacgaggtctgcacaacatcaccacatgacagggtaacggagaaggctatgtgttctatttttggcgtactggatattaaaactgacgcaggcgaactgcgtaaaaaggcactggaactttcccgcctgatgcgccaccgcggaccggactggtccggcgtttatgccagcgataaagcgattctcgcccacgaacgtctgtcgatcgtcgacgtcaacgccggggcccagccgctctataaccaacaaaaaacccatgccctggcggtcaacggtgaaatctacaaccaccaggcgctgcgcgccgaatatggcgaccgctatcagttccagaccggttctgactgtgaagtgatcctcgcgctgtaccaggaaaaagggccggagttcctcgatgaactgcagggaatgtttgccttcgcgctgtatgacagcgagaaagacgcttacctgattggccgcgaccatatcggtattatcccgctgtatatgggccacgacgagcacggcaacttctacgtcgcctccgaaatgaaagcgctagtgccggtctgccgcacgattaaagagttccctgctggtagctacctgtggagccaggatggcgaaattcgccagtactatcagcgcgactggttcgactacgacgcggtaaaagacaacgtcacggataaaaacgaactgcgtcaggcgctggaagagtcggtgaagagccacctgatgtccgacgtaccttacggcgtgctgctctctggcggcctggactcgtcggtgatttcggccattaccaaaaaatacgccgcccgccgcgttgaagatcaggagcgcagcgaagcctggtggccgcaactgcattcattcgcggtcggcctcgaaggctcccctgacctgaaagcggcgcaggaagtcgcaaaccacctcggcaccgtgcatcacgaaattcactttacggtgcaggaagggctggatgcgatccgcgacgttatctatcacatcgaaacgtatgacgtgaccaccattcgcgcctcgacgccgatgtacctgatgtcgcgtaaaattaaagccatgggcattaaaatggtgctctctggcgaaggttccgatgaagtattcggcgggtatctctacttccacaaagcgccgaacgctaaagaactgcatgaagaaacggtgcgtaaactgcaggcgctgcacatgtttgactgcgctcgcgccaacaaagcgatgtccgcctgggggtagaggcccgcgtaccgttcctcgataagaaattcctcgatgtggcgatgcgcatcaacccgcaggataaaatgtgcggcaacggcaagatggaaaaacatattttgcgcgaatgctttgagtcctatctgccagccagcgtcgcctggcgccagaaagagcagttctccgacggcgtgggctatagctggattgatacgctgaaagaagtggcggcaaaacagattagcgatcagcagctggagacggcaagcttccgcttcccgtacaacacgccgacctctaaagaaggctacctgtaccgcgaaatcttcgaagagctgttcccgctgccaagcgcggcggaatgcgtacccggcggcccgtccgtcgcctgctcttcagcaaaagccatcgagtgggatgaagcgttcaaaaccatgaacgatccatcaggacgcgcggtcggcgtccaccagtcagcttataaataagcaatcaacaagcatagcggaccctacggggtccgtcaggctgctgacaaagaaggaaaaagcgtggtttttccttctttgtggctatcagtcgaaaatcaatgaattgattttccttgttatttgcctgtcgctatctgcaaacctaacgatgcataaggtttgtcatcaatctcacggaccctacggggtccgttttttttatgcagaatttggcaaataaaaacgataaataatcaattcttgccgattattgcagcatgctgttcgcaacctaaccaaacagtcacattacgacgattttccttgaaaaagtggttgacgctcgcaggcccaatacgcataatgcgccccgcaacgccgataaggtaacgcgaaaaaaagatggctacgtagctcagctggttagagcacatcactcataatgatggggtcacaggttcgaatcccgtcgtagccaccatcttttttgcgggagtggcgaaattggtagacgcaccagatttaggttctggcgccgcaaggtgtgcgagttcaagtctcgcctcccgcaccattcaccaaaaagcgttgcacggatggggtatcgccaagcggtaaggcaccggtttttgataccggcattccctggttcgaatccaggtaccccagccatatttcttcgatatttgcggttagccgcgacggtattggggtatcgccaagcggtaaggcaccggtttttgataccggcattccctggttcgaatccaggtaccccagccatcgaagaaacagcatgacaatttggctacgtagctcagctggttagagcacatcactcataatgatggggtcacaggttcgaatcccgtcgtagccaccatattcaggactatcggttaatatcggtaaatccgtaaaaatttgttggggtatcgccaagcggtaaggcaccggattctgattccggcattccgaggttcgaatcctcgtaccccagccaaattcaaaagacgttcctctgtgaacgcagcctgttggggtatcgccaagcggtaaggcaccggattctgattccggcattccgaggttcgaatcctcgtaccccagccacttattaacaaaaaagctcacttcggtgagcttttttgctttctgcggatagtcatcttgccgatgcaggtactgcaaaacttcagtctgcagcccccatcggcaaatgcccctttataaccctaatgcatatttcaatgcctgacgctttaatacaccggcacgttcggcagccatcaggccaatattacgcagcacgcgtaccggcgctaaatcgttgctgaagcccgcatagaacagatccatgccggattgcataataaagttatccgcccggcgccgcgcctgatagcgcttcagcactggcaagctggaccaggcttccccgcgcccgcgggcttccgccaaaatatccagcagcgcgtcaacgtcgcgatagccaaggttaaccccctgccccgccagcggatgaatggtatgcgccgcatcccctaccagcgccagccccggttgcacgtactgcagcgcatgtcggcgggttaacgggaaggcgccggcgctcattggcgttacgctgcccagacgtttcgggaaatgcgcggtgatttcctgctgcagttgggccatcgacatcgcctgcagctggcggatgcgcgccggggtgtcgtaccacaccagcgacgcccagttatcgaatagcggcaggaaggcgcgcggcccgctggggtgaactgttgccaggtgctatcaccgggatcgtcggcgcattgcacgctaattagcatacaggattgctgatattgccacgcctgtacgccgatgccggccagttcgcgcacctgcgaattcgcgccgtctgcgccgatcgccagttgcgccgtgcaaacgctcccatcgctcaggcgcagcgaaacgccctgcggctcacgattaagctcgcttaacgtcacgccaacccgcaaggtcacctgctgatgggcttcgagtgcctgccaaagcgccagctgtagcacgttattttcaaccatatagccaagctcaggcagcttcagctcggcggcattaaagtcaacatgcgcgctttcccactcccaggtttcaagacgacgataagcatgcgcgcgcataccgcgcaccgcttcccagacgccgaggcttttgagcaagccgaccgacgaagcgctgatcgctgaaatacgcacatccggcgccgcagcggcatcaaaggccggaggcgcgtgcttttctatcaccgtcaccgaaaacccgtgttgcgccagccccagcgccagcgcgccgccgaccattccgccgccgacgatggcgatatctgttgcatgaattgtcatggcaattatccttaaagctgatttccttaagtttaccggattttttgcaccttgcgggggatcgtggtcgcactggtcaggtggcaaccaaagcattacaatgcgtaccctgcaaacgaattctaattcttaacttatacccgtctttataattgagcatgagcaagtcgatgacaaaaaaactccatattaaaacctggggctgtcagatgaacgaatacgattcatccaagatggccgatctgctggatgccacccatgggtatcaactgaccgaagtggccgaagaagcggacgtgctgctgctcaacacctgctcaattcgcgagaaggcgcaggaaaaagtgttccatcagcttggccgctggaaactactgaaagagaaaaaacccggcgtgattatcggcgtcggcggctgtgtcgcctcccaggaaggcaaactgattcgccagcgcgcccattacgttgacattatttttggcccgcagacgctgcatcgcctgccggagatgatcgacgcggtgcgcaataaccataaaccggttatcgacgtgagcttcccggaaatcgaaaaattcgatcgcctgccggaaccacgcgccgaggggccgaccgccttcgtttccattatggaaggctgcaacaaatactgcacttactgcgtggtgccctatacccgcggtgaagaagtgagccgtccgtgcgacgatattctgtttgaaatcgctcaactggcggcgcaaggggtgcgtgaagtcaacctgctcgggcaaaacgttaacgcctggcgcggcgaaaactatgacggcacgaccggcaactttgccgatctgctgcgtctggtcgccgccatcgacggcatcgaccgtattcgcttcaccaccagccacccgattgagtttactgacgatatcatcgaggtctatcgcgatacccctgaactggtgagcttcctgcatttgccggtacaggccggttccgatcgcgtactgaacctgatgggccgtacccacaccgtgctggaatataaagcgattatccgcaagctgcgcgaagcgcgcccggatattcaaattagctccgattttatcgtcggcttccctggtgaaacgacggaagacttcgaaaaaaccatgaagctgattgccgaggttaactttgacgtcagctacagctttatcttctctgcccgcccgggcaccccggcggcggatatggtcgacgatgtctctgaagccgataaaaaacagcgcctctacattctgcaggaacgtattaatcagcaggcgatggcgtggagccgccgcatgctcggcaccacccagcgtattctggtagaaggcacttcgcgtaagagcctgatggagctctccgggcgcaccgagaacaaccgcgtggtgaacttcgaaggtacgccggatatggtcggtaaattcgtcgacgtggaaatcgtcgatgtctacactaactcactgcgcggcaaaattgtccgcaccgaagacgagatggggctgcgcgtcgtggaatcgccggaatcggtcattgcgcgtacgcgaaaagaaaacgatctgggcgtcggcatctaccagccgtaatcccggcaggcctgtcggttccggcaggccttgcatttcccctcctcgcccctatatctacagcaatgcttgcgccatattcccgtgacgtgaataatttccttattggccggatgacgattgtcctccggcaacacacgtaataagaggaacagtttgaacatagaaacccgtgaaattaccctggagccagcggacaatgcccgcctgttagcactgtgcggcccgtttgacgacaacatcaaacagctggagcgtcggttgggtattgagatcaaccgccgcgacaatcactttaaactgaccggccgcgccatctgcgtgcacgccgcggccgatattctgacaagcctgtatgtcgataccgcgccaatgcgcggccagattcaggatattgaaccggaacaaatccacctggctattaaagaagcccgggtgctcgagcagagcgccgagagcgtgccggaatatggcaaggccatcaatatcaaaaccaaacgcggggtgatcaaaccgcgtacgccaaaccaggcgcagtacatcgccaatatcctcgaccacgacatcacctttggcgtcggccctgcgggtaccggtaaaacctacctcgcggttgccgcggcggtagatgccctggagcgccaggaaattcgccgtattctgctgactcgtcctgcggtcgaagcaggcgagaagctcggcttcctgccgggcgacttaagccagaaagttgatccgtatttgcgcccgctgtatgacgcgctgttcgagatgctcggctttgagaaagtcgagaagctgattgagcgtaacgtgattgaagttgcgccgctggcctacatgcgcggacgtacactgaatgacgcttttatcattctcgacgaaagccagaacaccaccatcgagcagatgaagatgttcctgacccgtatcggctttaattcgaaagcagttatcaccggcgacgttacccagattgacctgccgcgcaataccaaatcaggtctgcgtcacgccgttgaagtgctggcggaagtcgatgaaatcagcttcaacttcttccacagcgaagacgtggtgcgccacccggtggtcgcccgcatcgtcaatgcctatgaggcatgggaagaagccgaacaaaaacgtaaagcagaactggccgccgagcgcaaacgcgaagcccaggaacaggagcaaaaatgagtcaggtgattctcgatttacagctggcctgcgaagacaccagcggtctaccggacgaagccctctttcaacgctgggtggatgccgtcatcccgcagttccaggaagagtcagagttaacgattcgcctggttgatgtcgccgaaagccacgagctgaacctgacctatcgcggcaaggataagccgactaacgtcctctccttccccttcgaagccccgccgggcattgagatgccgctgctcggcgatcttattatctgccgccaggtagttgaacaggaagctaaagagcaggaaaaaccgctggaagcccactgggcgcacatggtcgtgcacggtagcctgcacctgctgggctacgatcatatcgaagacgacgaagcggaagaaatggaaggcctcgaaacagagataatgcttgctctgggctatgaggatccgtacattgccgagaagattgctgaatagtaacttgccggatgacggcgcaagcgccttatccggcctacattcatgcgtatcccaagcctgataagcgtagcgccatcaggcgaaacatgccgtacgacgctgagtttacgcgcgacgagcgacaattaaatcaacacgagaacccatacgacgccatgagcgacgacaattcacacagtagtgacacagtaaacagcaaaaagggatttttctccctcttactcagccaacttttccacggtgaacccaaaaaccgtgatgaattattggcgctgatccgtgactccgggcagaacgagcttatcgatgaagatacgcgcgacatgctcgaaggggtaatggatatcgccgaccagcgcgtccgcgatattatgatcccgcgttcgcaaatgattaccctgaaacgcaaccagacgctggacgagtgcctcgatgtgatcatcgaatccgcccactcgcgtttcccggtcattagcgaagataaagatcacattgaagggattctgatggctaaggatctgctgccgtttatgcgcagcgacgccgaagctttcagcatggaaaaagtgttacgtccggcggttgtcgtgcctgaaagcaagcgggttgaccgcatgctgaaagagttccgctcgcaacgttatcatatggcgatcgtcatcgacgagttcggcggcgtctctggtctggtgactatcgaagatattctcgaacttatcgtcggcgaaatcgaagacgaatacgatgaagaggaagatatcgatttccgtcagctaagccgtcatacctggacggtacgcgcgctggcatcgattgaagatttcaataaagcctacggcacccacttcagcgatgaagaggtcgataccatcggcggactggtgatgcaggcctttggtcatctcccggcccgcggcgagtcgattgacattgatggttaccaattcaaggtcgcaatggctgacagcagacgtattattcaggtccatgtaaagcttcctgatgatgcgccgcagccgaagctggaagactaatttaacgggacgattaacctaaatggtatttgcctctttacttgaacgccagcgcgtacgtctgctgctggcgctgttattcggagccagcggaacgctggctttttcaccttacgacttctggccagcggcgattgtctcgctgtttggtctgcaggcgctcactctcaaccgtcgcccgctacagagcgcctggattggctacttctggggcttgggctattcggcaccggtattaactgggtttacgttagcatcgcgcagttcggcggcatgccgggcccggttaacgttttccttgttgctttgctggcggcctatttatcgctgtacaccggtctgttcgccgggatcctcgcgagactatggccgaaaaccaactggatccgtttggccatcgccgcgcctgtcatctggcaaattaccgaatttctccgcggctgggtgctgaccggtttcccgtggctgcagttcggctatagccagattgacggtccgctaaagggcctggcgccggtgatgggcgttgaggcgataaactttttgttgatggtggtcagcggcctgctggcgctggctatcgcgcagcgtcactggaaaccgctgctggtggcgatagtgctatttgccctgcccttcccgctgcgttatatccagtggtatcaactgctgcctgagcgggcgacggaagtctctttggtgcagggcgatattccgcaggcgatgaaatgggatgaaaaccagctggtaaacaccctgaaaacctatctcgatctcacccagccgcatatgggtaaatcgcagctgattatctggccggagtcggcgattccggatctggaaatcaatcagcagcatttcctcagcatggttgatgacctgatgcgggcaaaaaatagctcgttgattaccggtattgtcgatgcgcgcctcaataaacaaaaccgctacgatacctacaacaccatcatcacgctgggtaaagataacccgtacagctacgactcgagcaatcgctataacaaaaaccatctggtgccgttcggcgaattcgtaccgctggagtcgattttacgcccgctggcgccattcttcgatttgccgatgtcctcgttcagccgcggaccttacgtgcagccgcagctggtggcgcataacctgaagcttacggcggcaatttgctacgaaattattctcggcgaacaggtccgagataatttccgcccggataccgattatctgctgaccatctccaacgatgcgtggtttggtaagtcgataggcccgtggcagcacttccagatggcgcggatgcgcgcgctggagctggcgcgcccgctgctgcgcagcaccaacaacggtattaccgccgttattggccctcgaggtgaaattcaggacatgatcccgcagtttacccgcgcggtgttgaccaccaaagtcacgccaaccaccggcctgacgccgtatgcccgtaccggcaactggccgctgtgggcgttaaccgccctctttggctttgccgcgctggtgatgagcctgcgccagcgtcgacgctaatcttttccgccgggcagcagcccggcctgctcccggcggcattcgtcgccggcgggccttccccgctttacgctctccagcgccaatctggcacgtccattgcttaatttcatccctgtaggcgattttgaccgcggttgtaccagggttgcaccgaaagcgttcgcacttcgcgccacgttggtgcaacaacccatttttgcccacaaatggtgcggtgcgcttcgcaaaaataaacaataacgcatcaaaatctttacattaagccaaactaaatgctaacaagctcatacaaatactgcactttaagattgcagacgattcccgaaagcgccgccttacggcagtgctcacaggaataacaacacatacacacaatcacaatgggtatcactagcgtccctggcgttaaggataaggagttggatatgcaattacgtaaactggccgccgcaatgctggtcatgggagtgaccgctggtctggcgcacgctgaagatgccgccccggccgcaggtcagagcacgctggataaaatcgccaaaaacggggtgatcgtcgtcggccaccgcgagtcgtcagtaccattctcctattacgataaccaacaaaaagtggtgggttactctcaggattactccaacgctatcgttgaagccatcaagaaaaagctgaataaacccgatctgcaggtgaaactgattccggtcacctcgcagaaccgcatcccgttactgcagaacggcacttatgatttcgagtgcggttccaccaccaacaaccttgaacgtcagaagcaagccgccttctccgataccattttcgtcgtcggcactcgtctgctggtgaaaaaaggtggtccgattaaagacttccctgatctgaaagacaaagcggtcgtcgtcacttccggcaccacctcggaagtgctgctgcataagctgaacgatgagaagaaaatgaacatgcgcatcatcagcgcgaaagatcacggcgactctttccgtacgctggaaagcggccgcgcggtggcctttatgatggatgatgccctactggccggcgagcgcgcaaaagcgaagaaaccggataactgggaaatcgtcggcacgccgcagtcgaaagaggcctatggctgcatgctgcgtaaagacgatgcatcgtttaaaaccctgatcgatgacaccgttgcccaggcgcagacctctggcgaagcggcaaaatggttcgacacctggttcaagaacccgattccgccgaaaaatctgaacctgaacttcgaactctccgacgacatgaaggcgctgttcaaatcacccaatgacaaggctcttaactaattaaaaaaacaggggctcgataaagtagccctcccgattgttgcctttgcacggacagactatacggtggctggtcgttccccagccgccgcgaataccgaaacaagcagggcaacaatcttcgagggtagcgctgctacccttttttttctggagtttatttatgtcaatagactggaactggggaatattcctgcaacccgccccgttcggcaacaccacttatttaggctggttatggagcggctttcagatcaccgtcgcgctgtcgattagcgcctggattatcgctttcctcgtcggctcgctgttcggtattctgcgtaccgttcctaaccgctggttagccgggatcggcacctgctacgtcgaactgtttcgtaacgttccactgatcgtacagttctttacctggtaccttgttattccggagtttctgccggaaaacatcggcatgtggtttaagtcggaactggatccgaatatccagttctttgtctcctcaatgctgtgcctcgggctgtttaccgccgcccgcgtctgcgagcaggtccgcgccgcgatacagtccctacctcgtggacaaaaaaatgccggcctggcgatgggcctgacactgccgcaaacttatcgctatgtcctgctgccgaacgcctatcgcgttatcgtaccgccgatgacctcggaaatgatgaacctggtaaaaaactcggctatcgcttccactatcggcctggcggatatggcggcacaggcgggcaaactgctggattactcagcccatgcctgggaatcgtttaccgcgatcaccctcgcctatgtcttcatcaacgccgtaatcatgctggtaatgtatgtggttgaacgtaaagttcgcctgccgggcaatatgggaggcaaataatgtacgattttgactggagttcaattgttccttccatgccctacctgctggcagggttggtcattacgctgaaaatcaccgtcacggcaattattatcggtatcgtctggggcaccattctggcggtgatgcgcctgtcaagcttcctgccgctggcgtggtttgccaaaacctacgttaacgttttccgctcgattccgctggtgatggtgctgctgtggttctatctgatcgttcccggattcctgcaaaacgtgctggggctgtcgccgaaaaccgatattcgcctgatttcggcgatggtggcattttcgatgtttgaagcggcctactattcggaaattatacgcgccgggatccagagtatttcccgtggtcagtcgagcgccgcgctggcgctggggatgacccactggcaatcgatgaagttggtgattctgccgcaggccttccgcgcgatggtcccgctgctgttaacccagggtattgtcctgttccaggatacctcgctggtgtacgtcctgagcctggccgatttcttccgtaccgcctccaccatcggcgagcgcgacggaacccaggtggaaatgatcctgttcgcaggcgccgtttattttgtatttagtctcagcgcatcgctgttggtcagctggttgaagaaaaggactgtgtaatgattaccctgaaaaatatttcaaaatggtatggtcactttcaggtgctgaccgattgctccaccgaagtgaaaaaaggcgaagtggtggtggtttgcgggccgtcaggctccggtaaatcgacgctgattaaaaccgttaatggccttgagccggtgcagcaaggcgaaattatcgttgatggcactcaggttaacgataagaaaaccaatcttgctaaactgcgttcccgcgtcggtatggtattccagcactttgaactgttcccgcacctgtcgatcatcgacaacctgacgctggcgcaaattaaggttctcaatcgcgataaagaatcttcgcgtaaaaaggggcttaagctgctggagcgcgtgggtctggcggcgcatgcggaaaaatatccggcgcagctctccggcggccagcagcagcgtgtcgcgatcgcgcgcgcgctgtgcatggatccgattgcgatgctgttcgatgagccaacttcagcgctagacccggagatgatcaacgaagtactggacgtgatggtcgagctggctaacgaaggtatgaccatgatggtggtgacgcacgaaatgggctttgcccgtaaagtagcgaaccgggtcatctttatggatgaaggtaaaattgtcgaagatgtcgataaagaagccttcttcgccaacccgcaatcagaacgcgcgaaagatttccttgccaaaatcctgcactaaaatcccagcgcgcacgtcatgtgcgcgccttttctctctcgataatgtgtgccatatattagtggtttattttaattgttttcttattaaaccagtgaataatttaacactccccctaacaaatcacattctaaattaatttaattcatacaaaattcagttttcttcgcatggctaagcgttaccaccaccgctaacatacccccttaagaacaagccctgggaatatttccctacacaaaatttcctgataataaaaaataatatttttatagatgaccctataccctgaataaggccgtattttaagcaagcttagctatacagcatgcaaatttaatgaaacaaatggaacttgcttcatgtttaataaaaaaatctgattcacaccctgctgattgtgtttttgtgtcagcagcaggttttcgccagtacgatagtctccaccacgactaaccaaaacgagcaggataaagcccgtcatgcggcgctgacgccacagcagcaggccgcccaggcttcactaattaataccgaccgacaaacgctcacgtttccagaggaagaaaactgcaggttcatcaataatattcatatcgattctgccgagccgaagctcacgcatcagcttctggacaaccttacagctcaggctctgcatcgttgtctggggattaacggtattcagtacctcaccctggcattacaaaatgagttaatcgcccgtggttacatcacttcattactgaccattccggaacagtcattgacggagggcacattaaggctcgaactcgcttatggcaaaatcggtgatattttctggtcaacgacaagcgagcaaaccaccagcatctggaacaatatccccaccggtaagggaaatatcctgcggctctccgacctcgaacagggaatggaaaacctgcgccgcctgccaggaagttcggcaaatatgcaaattttgcccggtcaacaggaggcagaaagcaatctgcagcttacgcggcgtctggataaaaaatggcaggtggcagcctggatggatgacgctggcagccgcgccagcggtcgctatcaggccggaggggcgctctatctttatgatatcaccacactcaacgacattttctatgtctcaggaggcggagatatcgagtttaatcaacataatgatggtaaccagaatggcagtctgtattactcgattcccttcggttactgggcgttaagtctttacggttcacaaagtcaatatcgccagttgttcaagggcaactggtcgcaaacggattataaaagtaaaaaccgctattacagcgcgatgctgtcacgactgctgtctcacacccgtcagcaaaaaacatcgctggatttccgtatctcaaaaagtacatcacactattactttggcggtgaagaactcagggtgatgcgcaaacagaacccgacatgggagctgacgttacgtcagcaacgctatttcgataaaaaagtcgtcgccgccagcctggggctgcagcgccgtctcccttggctaaactccgtcgccacaccggaagaaaaggcaggccagttcagcaggcgttcacgcgtagtgcatgccgatttgcaggctttaatgaagtttgatttaaccggcgataaatttagctacgcaccgcatttcaatgtgcaatatagcccggacattctctcttcggataaccaatttaatattggcaaccgctggacggtccgcggatttgatggcgaatatacgctctccggcaatcagggctggtactggagcaatgattttatctgggacatcgccgggcagcagcaattttatttaggattagatattggtcgtattattggcagcgaacaatatcggcaaggaaaagttatttcaggtgccgttagcggattgcgcggtgatatattatcaacacaatatgattttttcatcggcacaccgctaagtaaaccagataactttagtagtgactcattcaatatgggtttctcattgaagtggaagtattaacacaacctgtttttcattatatttaaaggaataaattcatgtttaagtttaaattaacctatgttgctttagcagcagcgttaagctcgacggtggtgtacgccgatccgtcgacttacacccatctatcaggcgcaaaggtggttgatattgaagcgccgaatgctgcaggcgtttcgcacaacctgtatcgtgaatttaacgttggcagcaacggtttaatactcaataacagcgacagcgatattaatcatgcgacttttgtcaatattgctaaaaacaacaatctgactaatggcggcgcatcggtgatcctgaatgaagtcacctccaataaagccagttcattaaatggtttcattgaagtcgccgggctgaaagccgacgtggtaattgctaaccctaacggtattacctgctccggctgtagtttcgttaataccaacaaggcaatattaacgacaggtcaggtgaatttgaccgatgaaggcgctatcggcagctataccatcaccaatggcaaaatcaccatcggcgaaaagggcatggatgccgctaacagctatgcagttttacttgccgacgcgattaaaattaatggtcaagtgcaggccaagaacgcccttgttagtgctggtaacttcaccatggataacaactctggcgcggtgacctctgcgggtaaaaaagcgaccctgatcgaaatgacgcttaacccgcaatacagcatcgacgtcagtagtcttggcggcattactgccaacagcattagcatgattggcaataacattggttttggcgtacgtaataatggctctattatctcaaacagctcactgcagctcaccagttacggaaacctgataaataaagggacgataaaaggcaacggtttgctgagccaaatttctacggccacaggtatcaccaatgagggcagtattggcggagccaattatttaatgctctccagtggggattatatcgttaacgtcggttctatcaccggcggtcagctaattgccagcgctaacggtaacatcactaacggcgactctggaacgatgaccggaaccagtgggttaagcctggccagcggtggaaaaatccgtaatgaggctaaggcctccctgctgtcgaataaccagatttccgccacggcaataggcgattttctgaatgaagggaaaatcagcgctaaaaacaccgcccttacttttgttggcgagagctttaaaaatactgggaacattaattcaaccggcaacaccaccattcagtctcttaagcaggatggtaccgtgaatgtcggggaaatctacaatctgggttatatcactggcgaaaatatcaatctacaaaccaacggtacgttggcgcaaagcaccagtgggaccatgacggccacaaacgctatcaccgcgcatagctactggctgaataacaacggtgcgatgaaagcggcaagcatcaccaccgatcacggcccggtgaataataccggctcaatcaaagcggataccatttcaattaccacaactggagatattgttaacgaaggcaccatcttcagcaccggcgatctgctgctggacacccagttgaaaggcaatatctataactactcattaattcaggcgaacggcaccttaaacatgaccgcgaaaaaggtggttaacagtggtcgcggctgcggttggttgaaatttaatacctgtgatgtcggcaccatcaacgccaacaagatggtcctcaactcctcatataaatacgccagcgagatgggcggttatcaatactttaagattgcggaaatcaataccgttctgtaatgactcagcgatgcgcagcgcaatgcgcatcgctgcttttagcgtttacggctcaaatggccgacgctggaactgatcgtgcccgcactttgggcaccgcggcaatacgtccgggtatacaccgccaggtgatagtggcacttctcgcataccaggttgccaagacctaccacttcaccgctgtgatagaccccgtggtggttcagatcctgaaatacttcgcgccactcaagctgggttttatcggtgatatcggcaagctcctgccacagactctctttgatcacccgcataaatacgctgtcgctgtcgtcttcctgactctcttcatagctgcgggcaaattcttccagatcgcgctttaccgccgcgattagcgattcaatctcgctctgcgtcaaatcgcctgcctgggtgattttctccctcgcctgcttcaccagcgcgtcaatgtcacgctctccattgcgcagccgttcactgagcgaggagaccagttcccggtaatattgagcaaccttgttcatcatttcgcctccggtgtgattaactgcttctaataatagacgttatcggcggtttgctttgccatccgcgccacagagtcgcgaaaaattctgcgccgcttttgccgatgttaatgtgcgaaaggctgttttgacgtggacgtttgggctatgctatgccgatctgaaataacacatccattggctacattttgtagctgtattgaaaacaggaccactggctgccatgcaagagcaataccgcccggaagagatagaatcgaaagtccagcttcactgggacgaaaatcgtacatttgaagtaactgaagacgagagcaaagagaagtattactgcctgtcgatgcttccttatccttctggtcgactacacatgggtcacgtgcgtaactacaccatcggcgacgtcatcgcgcgctatcagcgcatgctgggcaaaaacgtcctgcagccgatcggttgggatgcgtttggtctgcctgcggaaggcgcggcggtgaaaaacaataccgcgccggccccgtggacctacgacaacatcgcatacatgaaaaaccagctgaaaaagctgggcttcggctatgactggagccgtgaaattgcgacctgcaccccggaatactaccgctgggagcaaaaattcttcaccgagctttataaaaaaggcctggtatacaagaaaacctccgcggtcaactggtgccctaacgaccagaccgtgctggctaacgaacaggttatcgacggctgctgctggcgctgcgataccaaagttgagcgtaaagagatcccgcagtggtttattaaaatcaccgcctacgccgacgaactgctcaacgatctggacaacctggatcactggccagacaccgttaagaccatgcagcgcaactggatcggccgctctgaagggtagaaatctcctttgacgttaacaactacgccgataagctgacggtctacaccacccgcccggatacgttcatgggctgcacctacctcgctgtcgctgcgggtcacccgctggcgcagcaggctgcggctaacaatccggcgctggccgccttcatcgacgaatgccgtaataccaaagttgccgaagccgatatggcgacaatggagaaaaaaggcgtcgacaccggctttaaagctattcacccgctgaccggcgaagccatcccggtatgggcggcaaacttcgtgctgatggagtacggcaccggcgcggtgatggccgttcctggtcacgaccagcgcgactacgagtttgccagcaaatacggcctgaacatcaagccagttatcctcgccgccgacggttccgagccggatctctccgagcaggccctgaccgagaaaggcgtgctgttcaactccggcgaatttagcggtcttgattacgaagcgggcttcaacgccatcgccgacaaactggctgcgatgggcgttggcgagcgtaaagttaattatcgcctgcgcgactgggggtttcccgccagcgttactggggcgcgccaattccgatggtgactctggaagacggtaccgtgatgccgacgccggaagatcagctgccggttatcctgccagaagacgtagtcatggacggcatcaccagcccgatcaaagccgatcctgagtgggcgaaaaccaccgttaacggcatgccggcgctgcgtgaaaccgacacctttgacacctttatggagtcttcctggtactacgcgcgctacacctgcccgcaatacgataaaggtatgctggatccgaatgccgcgaattactggctgccggtggatatctacatcggcggcatcgaacacgccatcatgcacctgctctatttccgcttcttccacaagctgatgcgcgatgccggtatggtgaactccgatgagccagccaaacagctgctgtgccagggtatggtactggccgacgcgttctactacgtcggcgaaaacggcgagcgtaactgggtatcaccgattgacgccaccgttgagcgtgatgaaaaaggccgtatcgttaaagccttcgacccacagggccgcgaactggtgtacaccggcatgagcaaaatgtccaagtcaaagaacaacggtatcgacccgcaggttatggttgagcgctacggcgcggataccgtacgtctgttcatgatgttcgcctccccagcagaaatgacccttgaatggcaggaatctggcgtagaaggcgcaaaccgcttcctgaaacgcgtctggaagctggtttacgagcatacctctcagggcccggctgtcgccctggacgtggcaagcctcagcgaagatcagcaagcgctgcgtcgcgacgtacataaaacgattgccaaggtgaccgatgatatcggccgtcgtcagaccttcaataccgccattgccgcggtgatggagctgatgaacaagctggcaaaagcgcctcaggaaggcgaacaggatcgcgcactgatgcgtgaagcgttgctggccgtggtgcgtatgctcaacccgttcaccccgcatgcctgcttcaccctgtggcaagagctgggcggcgaaggcgatatcgacaatgcgccgtggccggtggcagacgaaagtgcaatgattgaaaacacgactctggtcgtcgtccaggtaaacggtaaagttcgtggtaaaattaccgttgcggtagacgcaaccgaagagcaggttcgtgaacgtgcaggccaggaacatctggtcgcaaaataccttgaaggcgtgaccgtacgtaaagtgatttacgttccgggcaaactgctcaatctggtcgttggctaagcgcgggaggaagcgtgcgatatctggcaacaatgctgttatctctggcggtgttaatcaccgctggttgcggctggcatctgcgtagcactacgcaggtcccaaccacaatgaaaactatgattttccagtcaagcgatccgaatggtccgttaagccgtgcggtacggaatcagctacgtctgaatggcgtagaactgatcgatgccgatacgctacgtaaggacgttccgtccctgcgtctgggtaactcatccattcagaaagatacggcatccattttccaggatggtcgtaccgctgaataccagatggtactgaccgttaacgccaccgtattgatcccgggtcatgatctttacccaatcaataccaaggtttatcgctcgttcttcgataacccgcaggcggcgctggcgaaagatgccgagcaggacatcattattcgcgaaatgtacgacaaggccgcggaacagctgatccgtaaactgccaagtgtgcatgttgcggatgtcgaagccactaaagaggctgagcagccggtgtctggtaccccggccacctcgacctctggcaaccgcgtctccactacgctgggtaactgatgattcggttgtacccggaacaactccgcgcgcagctcactgaagggctgcgcgcggcgtatttattgcttggtagcgacccattgctgttacaggagagccaggatgcaatccgcgaagccgcggctgctcagggctttaccgaacatcacaccgcgactatcgatgccagcaccgactggcccaccctcttctctttaagtcaggcgctaagcctcttttccagtcgccagacgctactccttatcttgccggaaaacggcccgaatgcggcgatcaacgaacagctgtccacgctggtcggtatgctgcatgaagatctgttgctgattgtccgtggtaacaagcttaccaaagcgcaggaaaacgcggcatggataacagcgcttgccagccgcgccgtccaggtgagctgccagacgccggaatacgcgcaactaccgcgctggctagccgcccgcgctaaacagaatcagttgcagttagatgaggccgccagccaactgctgtgttactgctatgaaggcaacctgctggcgctggcgcaggcgctggagcgcctctctttgctgtggcctgacggtaaactgacgctaccgcgtgttgaacaggcggtgaatgacgccgcccattttacgccgtatcactgggttgatgccctgctggccggtaagagcaaacgcgtactacatgtcctgcagcaactgcgtcttgaaggctgcgaacccgctattctgctgcgcacgctgcagcgcgaactactgctgctggtcaatctgaaacgtcagtcggcgcatacgccgctgcgcacgctgtttgataaacaccgggtctggcagaatcgtcgtcaactagtcggggacgcgctcacgcgcctcagcgctgagcagttacgccaggccgttacgttattaacccgcgccgagctcacgttcaaacaggactacggccagtcaatatggcccgagctggaaagcctttcgttattgctctgccataaagcgctggcagacgtttttattgatggttgatatgactcagttgcaggcaatgtacggcggcaccttcgatccggttcatttcggtcaccttaagccggtagagattctggcaaaccaaattggtcttagccgggtcattatcgtgcccaataacgtgccgccgcaccgcccgcagccggaagccaccagcgcacagcgggtgcatatgctggagctggcgattgccgataagcccctattcgttctcgacgagcgcgagctacagcgcgatacgccgtcctggacggcgcaaacgctagaggagtggcggcaagaacaaggcccggaacagcccctggcgtttattatcggccaggattcgctgctgaccttccccacctggcataactacgccacgatcctcgataacgcgcatctgatcgtctgccgccgtccgggatatccgctgacgatgaagcgcgaagaagatcagcaatggctcgataaacacctcacccacgatgtcgagctgttacataaccaccccgccggggttatctatctggcggaaaccccatggttcgatatttctgccacgctgattcgtcagcgtctacagcagggtgtctcctgcgccgatatgctgccagccgccgtactggactatattcaccagcagaagctctattgctgagaaccggctgcgaggatatcgttaccctacgcgatttccacggagtgcatcatgaaattatggctggttcgccacggcgaaacgcaggctaacgtcgacggactatatagcggacatgcaccgaccccacttaccgaacgcggtatccagcaggcgcgatcgctgggtgactgtctgcgggcggtgcctttcgaccaggtattgtgcagcgagctggcgagaacccagcataccgccgacttgttgctcgcaggccggccaatccctcgacaaattattccttcgttgaatgagatgttttttggcaattgggaaatgcgccaccatcgcgatttgcaaaaagatgacccgcagaactacgctgcctggtgcaaagactggcaacacgccacgccgaccaatggcgaaagctttcaggcctttgccctgcgtatcgcagacttcgccgccaccctcgggcaatatcaacagcaggctaatctgctcatcgtcggccatcagggcgctttaagcctgttaatcgcactattattgcaaatgcctgcggcagcaatgtggcactttcccgtcacccatggtagctggagccttatcgaacagcgcgacgatttcgctaccctgcgcgtattaaatagccaggcgcagtggcgcgcggaataagaattcatggccgcccattgacagccgggtgcaggctgttattctccgcagccaggctacacccgctatacgcatcttgcagaaattgttttacaaaaatggcgatgcattcgtcggcaagggatgggatgatagcccgctttcaagggctgaaagctgacttttctcccgacattgccttgacttcgggtatactgtcaggctcgttattgttatcactcttcacgcacccaggggaacacttgcagggtaaagcactccaggattttgttatcgacaaaattgatgacctgaaaggtcaggacatcgtcgccattgatgtacatggcaaatccagtatcaccgattgcatgattatttgcaccggcacctccacgcgccacgtaatgtccatcgccgaccatgtggtacaggaatcccgcgccgccggtatgctgccgctgggcgttgaaggtgaagccgccgccgactggatcgtggtcgatctgggcgacgtgatggttcacgtcatgcaggaagagagccgtcgtttgtacgagctggaaaaactctggagttaatgcgtgaagctacaattggtggccgttggcaccaaaatgccggactgggttcagaccggctttagcgaatatctgcgccgttttccaaaagatatgccgttcgaactggtagagatccctgccggtaagcgcggaaaaaatgccgatatcaaacgcatcctcgaaaaagagggcgaaatgatgctggcggccgcaggcaagaaccgtatcgtgactctggacatccccggcaaaccctgggatacgccgcagctggcgcgagaactggaacgctggaagcaggatggccgggacgtcagtttactcattggcggcccggaaggtctctctccggcctgcaaagcggcagcggaacagagttggtccctttccacgctcacgttgcctcacccgttagttcgcgtgctggtggctgagagcctgtatcgtgcgtggagcattacgactaaccacccttaccaccgtgagtaatgatgacctgggtagactaagcagcgaatgaaattacagaattctttccgcgactatacggctgaatcctcgctgtttgtacgccgggcgctggtcgcttttacgggcattttgttgcttaccggcgtgctgattgccaacctctacaacgtacagattgtccgtttcaacgactatcaaacgcgttccaatgaaaaccgcattaagctggtccccattccacccagccgcggcattatctacgatcgcaacggcacgccgctggcgctgaaccgcaccatctatcagttagagatgatgccggaaaaagtcgataacgtgcagcagacgctggatgcgctgcgcgacgtcgtcgacctgaccgacgacgacatcgccggctttaaaaaagagcgcgcgcgctcccaccgctttacctcgattccggtgaaggtcaatcttaatgaagtccaggtggcgcgcttcgccgtaaaccagtaccgcttccccggcgttgaagttaaaggctacaagcgacgctactatccctataactccgccctgacccacgttatcggctacgtctctaaaattaacgataaagacgtcgatcgcctggataaagagggcaaactggccaactacgcatcgacccacgacatcggtaaactgggaatcgaacgctattatgaagacgtgctgcacgggcaaaccggctacgaagaggttgaagtcaacaaccgcggccgcgttattcgccagcttaaagaagtgccaccgcaggccggacgcgatatctacttaacccttgacttaaagctgcagcagtatatcgaaacgctgctggcgggaagccgtgcggcggtagtcgtcaccgacccgcgaagcggcgcgattctggcgctggtttcaaccccgagttacgatccaaacctgtttgtcgatggtatctccagcaaagattactccggattactcaacgacccgaatacgccactggttaaccgcgcgacgcagggggtctatccaccagcatcaacggtgaaaccctacgtcgcggtctcggccttgagcgccggcgtgattacgcgcaacaccagtcttttcgatcccggttggtggcagttgcctggctcggaaaaacgctatcgcgactggaaaaagtggggtcatggtcacctgaacgtcaccaaagcgctggaagaatccgcggatacctatttctatcaggttgcctatgatatgggcatcgatcgcctctccgaatggatgagtaagtttggctacggcgattacactggcgttgatctggcggaagaacgctccggcaacatgccaactcgcgaatggaaactcaagcgctttaagaaaccctggtatcagggtgataccatcccggtcggtatcggccagggctactggaccgctacgccgattcagatgaacaaagcgctgatgatcctgataaacgacggcgtggttaaagtgcctcaccttctgcaaagcaccctcaaagacggtaaacaggtaccctgggtacaaccgcacgaaccgccggtcggcgatattcattccggctattgggaaatcgccaaagacgggatgtacggcgttgctaaccgcggcaacggtaccgcgcacaaatactttgccagcgcgccatataagattgcggcgaagtccggtactgcgcaggtattcggcctgaaagccaacgaaacctataacgcgcaccgaatttccgagcgtctgcgtgaccacaagcttatgacggcgtttgcgccttacaacaaccccaggtcgcggtggcgatgatcctggagaatggcggcgccggcccggcggtcggtaccattatgcgccagatcctcgatcacatcatgctgggtgataacaacaccaatctgccgagtgaaaacccggcggtgacggcgggggaggatcaataatgaccgataatccgaacaaaaaatcactatgggataaaatccacctggaccccacgatgctgctcatcctgctggcgctgctcacctacagcgcgctggttatctggagcgccagcggtcaggatgtgggtatgatggagcgcaaaatcggccaaatcgccatgggcgtggtgattatgatcgtgatggcgcagatcccgccgcgggtatacgagggctgggcgccctacctctatattttctgtattattttactcgttgccgtagacgccttcggcgctatctccaaaggcgcgcaacgctggttggatcttggtattgtgcgctttcagccctcggagattgccaaaatagccgtgccgctgatggtggcgcggtttattaatcgcgatgtctgtccgccgtcattgaagaatacggctatcgcactggtactgatcttcctgccgaccctgctggttgcagcgcagccagacctcggcacctcgattttgatcgccctgtccggcctgtttgtcctgttcctctctggcctgagctggcgcttaatcggcatcgcggtggtactggtcgccgcctttattccgattttatggttcttcctgatgcacgattaccagcgtcaacgcgtaatgatgctcctcgatccagagaccgatccgctgggcgcgggctatcatataattcagtcaaaaatcgctatcggttccggcggcttacgcggcaaaggctggttgcatggtactcagtcgcagctcgaattcctgccggagcgccatactgactttatcttcgccgtactggcggaagagctgggtcttatcggggtgttgatcctgctggcattgtacattttgcttatcatgcgcggactgtggatcgccgcccaggcgcaaaccacctttggccgcgtcatggcaggcggtttaatgttgattttattcgtttatgtcttcgtaaatattggtatggtaagtggtattttgccggtggtgggggtacctttgccgctggtcagctacgggggctcagccctaatcgtattgatggccgggtttggtatcgtgatgtcgatccatacccacagaaaaatgttgtcgaaaagcgtttaaggggttcgcaatgcgtaagcaatggctggggatctgcatagcagcagggctgctggcggcatgttcgggtgaagacgttcagcagaagacggttagcgtcccgcagccggctgtctgtaatggtccgacggtagaaattagcggcgccgatccgcgtttcgaaacgctgaacgccacggccaatcaggattatgaacgcgatggcaaaagctacaaaatcgtccaggatccggctaacttcacccagaccggtctggcggcaatttatgatgccgaaccgaacagcaacctgaccgcctctggcgaagcgttcgatccaacacaacttaccgccgcgcatccaaccttgcccatcccgagctacgcgcgtatcactaacctggctaatggccggatgatcgtggtgcgcattaacgatcgcggcccgtacggcaatgaccgggtcatttctctgtcccgcgcctccgccgatcgcctgaacacctcgaacaatactaaagtccgtatcgatcccatccttgtctctcaggacggcgcgttatccggccccggtatggcatgcaccaccgtcgccaaacagacctatgccctgccttcacgtccaaaccttgatggcgatggctctgccgccatcgccccggccgatcaatcaaacgttcacgccatcagcaactcaacgcttaagcctgaggataacgtgggcgcgccggtcagcaatagtggtttccttggcgcgccgacgccgctgaataatggcgtactggaaagcagtgaacccgtagctgcgccagccgccgtcgccgcgacgccggctaccccagcgctccggtcaccgcgccaggctcgattcaggggagcgtcgcgccggccgcgaccgcaacagcagcaaccgccgctgttgccgcgccaaacgccagcaccagcggcgagttcgtcgtgcaggtgggcgccgttagcgatcaggctcgcgcccagcaatatcagcagcgtctgagccagcagtttgccgtcccgggccgtgtgatgcaaaacggcgccgtgtggcggatccaactgggtccatttaccagtaaatcgcaagcgacgacggtacagcagcgtctgcaaagcgaagcgcagctgcaatcatttattactcgcgccaactaaacgccacgccacggcatctcgcgctactgcatatgtaaaaatcattaacaaagtcatatgtaatgtcggatgccgctgcgaaacgcatttgttatagtaaggcactttttttaatttcatcacggatgccgttgttctaaccatgaagacctctttcaccgctcgtttactcgttacggccctctccgttgcggcactctccaccgctgcccgcgccgatgacctgaatatgaaaaccatgatcccaggcgctccgcagatcgatgccgaatcctgggttcttatcgattacaactcaggtaaagtgctggcggaaaacaacgccgatgcccgccgcgatccggcgagcctgaccaaaatgatgaccagctacgtcattggccaggccatgaaggcggggaaattcaaagaatccgatctggtcaccgtgggtaacgacgcgtgggcaaccgggaacccggtgtttaaaggttcttccctgatgttcctgaaaccgggcatgcaggtgccggtttctcagctgatccgcggcatcaacctgcaatccggtaacgatgcctgcgtggcgatggccgactatgtcgccggcagccaggacgcgtttgtcagcctgatgaacaattacgttaacgcgttgggcctgaaaaacacccatttccagaccgtccatggtcttgacgccgacggtcagtacagctctgcgcgtgacatggcgctgatcggccaggcgctgatccgcgacgtcccgaatgagtactccatctaccgtgagaaagagttcacctttaacggtattcgccagctgaaccgtaacggcctgctgtgggataacagcctcaacgtcgatggtattaaaaccggccataccgataaagcaggttacaacctggtcgcttctgctaccgaaggccagatgcgactgatctccgcggtcatgggcggacgaacctataagggtcgtgaatccgagagcaagaaactgctgacctggggcttccgcttcttcgaaaccgtcaaccccattaaagctgggaaagagttcgcctctgaaccggcctggttcggcgatagcgatcgcgcctctctgggcgtggataaagacgtctatctgactatcccgcgcgggcgcatgaaagacctgaaagccagctatgtattaaataacaccgagctgcacgcgccgctgcagaaaaaccaggtggtcggtaccatcaacttccagctggatggcaaaaccatcgatcagcgtccgttagtggtgctgcaggaaattccggaaggtaatttcttcggcaaaatcattgattacattaagttaatgttccatcactggtttggttaaaaattgagcacttgaaagtgtgatttctatccccatatactattcatcaaagaaacctgataactcccacattacgtgggagttattattttagtcgtcacaccggagctgacatgaaaaccaaacttaacgaactgcttgaattccctactccatttacttacaaagtaatggggcaggcgttgcctgagctggttgatcaggtggtggaagtggtacagcgccatgcgcctggtgattactctccgtcagtaaaaccgagcagcaaaggtaactaccactcggtctccatcaccattaacgctacccacattgagcaggtcgaagccctgtacgaagagctgggcaatatcgaaatcgtgcggatggtgctgtaatccctcgccttacccggcctcaagcgccgggtaatcctctttctttcgctgtgatatactctcccccacttaagtcatccctctcggcggagacgttgttttgcagcacaataccattcttattcgacaactcggcctgcaaccttacgaacccatctcgcaggcaatgcacgaatttaccgacagtcgtgacgacacgacgctggatgaaatctggctggtggaacatcacccggtcttcactcagggtcaggccggtaaagccgaacacgtgctggtaccaggcgatatcccggtcattcagagcgaccgcggcggccaggtgacctatcacgggccaggccaacaggtgatgtacgtattactgaacctcaaacgtcgtaagcttggcgtgcgcgaattagtgacgctgctggagcagaccgtggtcaatactctcgcggaatatcagattgaatcccatccacgcgccgatgcgccgggagtttacgttggtgaacagaaaatctgttcgctggggctgcgtattcgtaaaggctgctctttccacgggctggcgctgaatgtggcaatggatttaacgccattcctgcgtattaatccgtgcggctatgccggcatggagatgacgcagatgcgccagtggcagccacaagccactacggaaaacatcgcgccgcggctggtcgccaacctgctggcgctgctaaataacccgccgcatgagtatgtagacgcttgattagcgtagcgctctgaactctcagagcgcccgtaaattgcgcaagtcattattaatactttatatttgcaatcaattatcacgttccgcaatgctatggaccgctataatagcgttatacacacgacaaccggatacgctgagtggcagaaaaccatcccccatcggaacttaatgaacaacctgaagatcggcagatttttcgccttctgcgtaatatcgatcttaacctgctgaccatcttcgaagcggtctacgtgcataaaggtatcgtcaacgcggcgaaggtattaaatatcacgccttcggcgattagccagtccatcaataaactacgggccttgttccccgatccgcttttcatccgtaaaggtcagggagtcacgcctacggcttatgcgatccacctgcatcaatatatcagtcaggggatggaagcctttatcaatgcgctggatttgggtagcggctcgcatcagcagcgagtgctcaccattgccaccgcgccgaccgtcggtgccctggtgatgccgaaaatcgccaatgcgttgaaattgcgctttcctcaggtattactacacaatattgcgatcaccgatgccgccagccagctcaatcagcggcaggttgatttgctgatcgacacctatccccatagcgggctggccattacgcaccaggtgctgttttccgagccagtcgttatgttttgccgcgaaaatcacccaattttgcctcttccgctgacgaaagaaaatctacagcaatatgagttcgcgctattgttaccggaaggacagcgctaccctaccctgcatcgccagctagaagagtacgtcggcgaacgacgctgcggttttagcagctataacctgttgacccaggcggcgatgatgaataatagcgatttgctggggctaacgcccaagagtatgttcgcgctggtggcgaaaatctggcctttacaagccattccttttccaccgctgcaggaccagcgtattgatatttcgctccattacaaccggcaaagcgcgcaggagccgttactgaaagagattatcgacaccattgtgcaaacttattcctgctaaccgcacgcgagggaaaaggataaaacaacaactattttacaatttgccgggtaaccaggctgctttcaaccccgtatcaatgatatactgcctgtccttagttcaaaaatagttgataaatacaacatttgattgaattaattcgctttccttcgtgactcgcaactggaacacgcacgctatgagtaaacccattgtgatggaacgcggtgttaagtaccgcgacgccgataaaatggcccttatcccggtgaaaaacgtggcaactgagcgtgaagctctgctcagaaaaccggaatggatgaaaatcaaacttccggctgactcgtcccgtattcaggggatcaaggcagcgatgcgtaagaacggcctgcactccgtgtgcgaagaagcctcttgcccgaaccttgccgagtgcttcaaccacggcaccgcgacctttatgatcctcggtgctatctgtactcgccgttgcccattctgcgatgttgcccacggtcgtccggtgacacctgatgccaatgagccgcaaaaactggcgcaaaccatcgctgacatgggtctgcgctacgtggtggtgacttccgttgaccgcgacgatcttcgtgacggcggcgcgcagcacttcgctgattgtattagcgcaatccgcgaaaaaagcccgaacatcaagattgaaacgctggtgcccgatttccgtggccgtatggatcgcgcgctggatatcctgaaagtgacgccgccggatgtgtttaaccacaacctggaaaacgtaccgcgcctgtatcgccaggtgcgtccgggcgccgattacaactggtctctaaagctgctggagcgttttaaagaagcgcatccggaaatcccgaccaaatcaggtctgatggttggtcttggcgagaccaatgaagagatcatcgaagtgatgcgagacctgcgtcgtcatggcgtcaccatgctgacgctggggcagtatctgcagccgagccgccaccacctgccggtacagcgttatgttagcccggaagagtttgaagagatgaaagctgaagccatggcgatgggctttacccatgccgcctgcggcccgttcgtccgctcttcctatcatgccgatctgcaagcaaaaggtatggaagtaaaataatctctgcctttctctggccgtcatgcgcgacggccagatttacctgctaacgcctctttccattgtcacacctggttgcatcttttttcatttccaaagcgtcggccataaaaaaggcgacaacgaatacgctgccgcctctttgccgccagaggttcacacccggccgcgacgcgcccccgctcatcgggaacccgtaattaattactctttatgagagagtttctgtgccggcgcttcttcctcagcgctggtctttttggcactgtcatcgtcatcattcatggctttcttaaagcctttgatagccgaccccaggtctccacccagcgtgcgtaattttttggtaccaaacactaaaataatcagcgctgcgactaccagcagtttggtaatactaatctcacccatagctaaccttcttctctatacaagctcaagctgcgaatacgccatcatacacatatacgcatacaattaacggctatttgacgcgccgacacaatagcaatctgtaacaaggtgaatcaagccttgtttaaaaaaacgtcacaataattgcggtggcgcaaatctgcgattatgcagcaccggcaaactctcacgcacctgacgaatataatctgcggatatctcagcaaaaatcagctgcggttgaacagcggcgccggcaatggtggtaccgagcggatcgataatccggctctggccgatattacgtgttccacactcgcctgccgcaataatgtagcaggtagtatccagcgctcttgccgccagcagcgtcgcccaatgatgttctttcattggcccgcgaacccatgcagcaggaagcaccaatacatcggcccctttaacgctaacgatagcgctaattcaggaaagcgtaaatcgtagcaggtcattaagccgattcgcatcccatttatatcaattaacggcgggatttgctcaccggcatccaccagtcgtgactcctgcatattaaacgcatcgtacaaatggagtttctggtattgtgcgctaatcatcccctgtcgtattacgaccagggtattgctcgcgcgcccatcaccagagggcacatgcagcgttaatatcgtggttaagtcatgacggcggctttcagccagcagttgctgcatgaagccgccgtccagcgcctgcgcggattttaccgacatatcaggatcgtcatcggcccgcgccagcaacgcctcgggcaagaccagtaatgatacgccgcattctgccgcctgacgcattagctccacgcaggtctgcgcattagtgtgccactgcgccgtgacggcgaattgccctgctgctacccgcatctctttctcccacttgcgaatccatagccaaaaacgcctttgtcgcgctacactcgaccctctacctaaccaaatagcaggaaatgaccgtgttacaactccttttagccgtttttgttggcggcggaaccggcagcgtgttgcgctggtggctgggcatgaaatttaacccaatgcatcatgcgattcccattggcacgctagtcgctaacctgctgggcgcatttataatcggcgccgggttggcgtggtttaatcgcctgacgcatgttgatccgatgtggaaactgcttattaccaccggcttctgcggcggtctgacgactttctccaccttttcagcagaagttgtcttcctgctccagcagggacgtttcagttgggcattattaaacgtgctggtcaatctactgggttctttcgccatgaccgcgacggcattctggctattctcacagtcagccgcccgctaaccacaggcaaaaaaaaacccgctataagcgggtttttatattctactgacgcgttggttagatagccattacgtttgcagcagaagggcctttggcaccgttagtgatttcgaactctacgcgctgaccttcagccagagttttgaaaccgttggactggattgcagagaagtgtacgaatacatctttgctgccatcttccggagtaatgaaaccgaatcctttggactcattaaaccacttaacgttacctttaatcttagacatcaaaattacctttaaattaaaaaacgacactaatgctgtgtcggataccagtacatcaattgtgatgccttttgtccagcgtaactttcttaaaaagtgataaaagtctctatctttatagccgacagttacgttagtcattgtttttcaacaagacaaagaacttatcacttttgtcactacgttataacgattaaaactgaatgcgtgcccaggcaaaataaacgttgccgttgttataagtgccggggatgtaggtcatctggaacgtcgccgggccgtagccaatcgatgccagcggcagcaccaccgggatcgggatatagttccagttgtcgcgcgccgttacgccaagggtataaccaaggccaaggtggaagttgtcatcggccagcgggcgccaggttttttcccagccatagccgccaatcggctcccacttattaaaggaatctttaaacgccatcagataaaggccgtgccagttacctttatcgtcccaacgcgacatgccaaaacccgcgccccaaggacgttcgttatacttgtcagttttctctttgtcgtaggcaaaacgggcgtgccaggtgatcgccggaacgtacagatcgtagtgctcaggctcgttccaggtttgcgcgacattgtccgtcagcgtattgtagccgtcacggatcgttgacgagaacgaggcgttagcatagccggacgacagcaacaggccggacagcgcgacaatgaacaatgcaaattgacgtagtttcaacacttctctattaccgatttcaattttaaaaacgaagtaaagtaacaaatgtaatcttaatagattgttaacggaataaggcaaaatcctgaattgcgccatggcaaaaaccgcatccttgtagacgacttttgtgatgttagccgcgccacgggttccgattagtcaattctcagtagtttattgatttgggtcagcaagttctgcccgttttttgggcacattccctcacttaatttttgtagtacttaagatatcagcagattctttgggttaatggcttaggggtaaagtatgcttacgcttgttgagatccttatcggggtcgtggttattgtgggcgtcgcccgctacattataaaaggctattccgcgacaggcgtgctgttcgtcggcggtttaaccttacttatcgccagcgccatcatgggacataaggttctcccggccagcgccgccagcacgggctacaccgcgactgacatcgtcgagtatattaaaatactgctcatgagccgcggcggcgacctcggcatgatgattatgatgctctgcggtttcgccacctatatgacccatatcggcgccaacgatatggtggtcaaactggcctctaaaccgctgcgatatattaactcgccttatctgttgatgatagccgcctacttcctcgcctgtctgatgtcgctggcggtctcctcagccactggccttggcgtgctgctgatggcgacactgttcccggtaatggtcaacgtcagtattagccgcggcgccgcggcggcgatttgcgcctcccctgccgcattgatcctgtcgccgacttccggcgacgtagtgctggcggccaaagctgccgaaatgccgctgattgatttcgctttcaaaaccactttacctatctcgattgccgctatcgtctgtatggccatcgctcacttcttctggcagcgctacctcgataaaaaagagaacgcctcgcacgagatgctcgatgtcaatgagataaccaccaccgcgccggcgttgtacgctatcctgccgtttacgccgataatcggcgtgctaatttttgacggtaaatgggggccggagttacacatcatcactattctggtgctctgtatggtgctggcttcggtactggaattcctgcgcagctttgacactaaaaaggtcttcgccgggcttgaagccgcctatcgtggtatggctgacgccttcgccagcgtcgtcatgctattggtcgcggcgggcgtattcgcccagggtctgagcactatcggttttatcgacggtctcatctccatcgccacctcgttcggttccgcgagtatcattctgatgctggtgctggtgatcctgaccatgctggcggcgatgaccaccggctccggcaacgcgccgttttatgccttcgttgagatgatccctaaacttgcccactcttccggcattaaccccgcctacctgtcgatccctatgttgcaggcatcgaatctggggcgcaccatttcaccggtttccggcgtggtggtggcggtggcgggaatggcgaaaatttctccattcgaagtcgttaaacgcacatcggttcccgttatcgttggcctgttggtagtgatcatcgccaccgagattctggtccccggcgccgcggttcaataaaccacaaaccgcagtgaaaaggcgccagcaggcgccttttttatgctttaataaatcccagcaattaatcatctcccactatcaggaataaaaatgttcaggaaggatgtcgtcgccattgcccttttacttggcgcaacgcaggttggcgcagaaccgcttaccgcgacgaaatacggtgatttcgatcgttacgtgctggcattgtcctggcaaaccggcttttgtcagagcatgttggatagtaaccgtaatgagcctgaggagtgccggctacagcaggaagaacgcaataaagccgattttctgacggtacacggcctgtggccgggcctgccgaagtcgatcgcctcgcgcggcgtcgacgagcgccgctggatgcgctacggctgcgcgacgcgccctatccccaacatgccggaagtcaaagccgggcgtaaatgccaggctgcggaaaccggactatcgctggaaatggccaataagttaaatagcgtgatgccgggttcgggcggtaactcttgcctggaacgctatgagtatgccaaacatggcgtctgtttcggcttcgatccggataactacttcggcacgatggtgcgcctgaatggcgaagtgaagcaaagcgcaatcggcgatttcctggcaaaacactacggacaaaccgtcagccgcagcgattttgatgccgccgtcgccaaagcgtatggcgcgcaaaacgtgaaagcctttaaattaacctgtgacggcaacccggcttatttaacggaaatgcaaatttctatcaaagctagcgcgatcaatgcccgttgggcgcagattcgttcctgccgcagccgcatccgggcaactgcgcgaagcagtttgtactggataaagtgggttcttgaaacaccagggacatcacccgccctgcaatcgtaccgacccttcatctgcttttgctaccgatgcgctgaatgtgcgcttaatcacttcaaacatcaggcaagtctcagtatgatgaagggacattaacccttgcccctttcggcgagggttttcttttacggaaaaggttcctggataacatggagtatgcaatgaccagacccgcaatcattattaatgaattcgatgctgaacgtatcgacagactgcttgaacagccggcatatgctaattcgccggtcgccgatgccctgaacgatgaactggatcgcgcgcaaatgctagcgccggaagcgatgccgcacgacgtcgtcagcatgaacagtaaagtccgcttccgcgacttaaccagcggtgaagagcgggtgcgaaccctggtcttcccgtcccaggctaccgatagcgccactcagctttcggttctggcgccggttggtgcggcgctgctcgggttgaaagtcggtacctccattcactgggagttacccggcggcgcatcggcgcatctggaagtgctggaactgctgtaccagccggaagccgcaggcgaattccaccgctaagtaccccactgcctgaggcgttttacgctttattcagaggatgcctcgtcatcctctttctgtttcccttcctctctgacaaagttttacctcaacccgtgacggcgtatacagttttgcgacctgaatgccacaatatccttgtataatatgttgatatagaaacagacaaacaaggagaaatgcatatgtataaaactatcattatgccggttgatgtctttgaaatggagctgagcgacaaggctgtccgccatgcagagtttctcgcccaacaggacggcattattcatttacttcacgtcttacccggttcatccagcttcaccatgagccgtttcaccgccgatctgcgccgttttgaagagcatttacagcatgaagcggaaactcgcttacagaccatggtcggccactttagcatcgacccttcacgtattaagagccatgttcgtttcggcaacgtccgcgatatggttaatgaactggcctatgaaatcaaagctgacgtggtagtaattggttcacgcaatccgtcaatcagcacccatttgctgggttcaaacgcctcaagcgtaattcgtcatgcccatattccggtaatggtcgtgagataacggaacgatgaaataagccaaaaaaagaggcgaccccggggtcgcctctttgcagtatgcaggtgttgtcttacgactttttatgcggttttggtacgaatgaggtaatcaaacgagctcaaagaagctttcgcaccttcgccagtggcgataataatttgcttgtacggcacggtagtgcagtcgccggcggcaaacacgcccttcacgttggtttcacatttggcatcaatgatgatttcacccatgcggttacgctcaaccgtaccttccagccagttggtgtttggcaacagaccgatctggacaaaaataccggctaacgcaacatgatgctcatcgccgctgacgcggtcgcggtactgcagccccgtcaccttactgccatcgccaaccacttcggtggtctgggcgttgagaataatatcgacatttttcaggctgcgtactttatcctgcagcacctggtcggctttcatttctggcgcgaattccaacagcgtcacgtgttcaacgacgcccgccaaatcaatcgccgcttcgacgccggagttaccgccgccaatcaccgccacgcgtttacctttaaacagtgggccgtcgcagtgcgggcagtaggttacgcctttagtacggtattgctcttcacccggtacgttcatgttacgccatttggcgccggtcgcgatgatcacgctgcgcgccttcagcaccgcaccggaggcggtttcaatctgatgcaggccgccttcgacggccgccgggatcagttttgccgcgctttgtgaatcaatcacatcaacatcatattcactaacatgagctttcagcgctcccgctaacttctgaccttcggttttcggtacggaaatatagttttcgatatctacggtatccagtacctggccgccgaagcgttcgcccatcaggccggtgcgaatgcctttacgcgcggagtatactgccgccgcggcgccagacgggccggagccaacaatcagaacgtcataagcatcgcgtttgttcagctcttctgctgcacgtttttccgcgccggtatcgactttggcaacgatttcagtcagcgtcatacggccttggccaaattcctgaccattcacaaacaccgccggtacgcccatcacgttgcgatcggtgatttcattctggaaggttccgccatcaatcgccgtgtgtttgatgcgcgggttaagcaccgccatcaggttcaacgcctgcaccacgtccgggcagttgtggcaagagagcgagtagtaggtctcaaattcaaaatcaccgtcaagattgcggatctgctccagcagcgactgcgcttctttcgacggatgaccgccggtccacagcagcgccagtactaatgaggtgaattcatgtcccaggggagaaccagcaaaacgcgggccctggttggaacctggattagtaatcaagaacgatggcttacgtaccgccagcgtgttgtcttctttaaaggtgactttgtctgacagttcagcgatttcagccaacagttccttgatctctgccgatttagcgctgtcatccagcgtggcaatcagctcaacaggtttagtcagcttctcaagataggccttgagctgggttttcatgttggtgtcgagcatttttatctcctgggcttaaaacatcatcatgcaagcggcctttgtcaggcagcctgaatgcgcttgcatcatggtgttggaataaaacgggcgcgggtacgcccgttgattacggggaataaaacgaattagatcttaccaaccagatctaaagaaggagccagcgtcgcttcaccttctttccacttagccgggcacacttcgcctgggtgggaagcaacgtactgagcggctttgattttacgcagcaggtcagacgcatcacggccgataccttcagcggtaacttcgattgcctggatgataccctgcgggtcaacgacgaaggtcgcgcggtcagccagaccttcatcttcacgcatgttgtcgaagttacgggtcagggcgccagtcgggtcgccgatcatcgcgtatttgatcttagcgatggtgtcagagctgctgtgccacgctttgtgggtgaagtgggtgtcggtagaaacagagtacacgtctacgcccagtttctgcagctcttcgtaatggtcagccacatcgcccagctcggtcgggcaaacgaaagtgaagtcagccgggtagaagaagaagacgctccagcggccttcagtgtctttttcggtaacttcgatgaattcaccgtttttgaatgcctggtttttgaaaggtttgattttggtattaattaaagacatcgatacttcctccgtgtttttgttgaggtctaagttaacgaatttttcctgactcgaccaatgcgtttgcattatcaaatcaataagcgttatctaacaaccgtaacaagacaactttgtgaacctgccgtcgcgatcgcggttttacccgcgcttcgcctcatttagctgaaagtaaaaaggccgccctctcaggcggccccgttacctgaaatacccgcaggtagcttcagcgccagaatcgctggcaatatgttgcgctctacaccttaatgtaacagcatgagtgattacatcattcaccgaatcaaagggcaacctggcccctggcaggtgttatctatggctgcgataggtttcacctccacaacatattagcttctgatttaaaaggaatactcatgctaaaacgactacttttcctgagcctgctgccgttgtgtagctacgccgaagacctccccgccccgtaaaagcaatagaaaaacagggtattactatcattaagccctttgaggcgccgggcggcgtcaaaggctggctcgggaagtatcaggatatgggcgttgctatctatctcacccccgacggtaagcacgccatttccggctatatgtacgacgaaaacggcaacaatctgagcgaacagcttttccagaaagaactctataccccggctggacaggcgatgtggaaaaaactcgagtccgctaactggctgctggaaggcaaaaaagaggcgcccatcatcctttacgtgtttgccgaccctttctgcccttactgtaaacagttctggcaacaggcgcggccgtgggttgattccggtaaggtgcaactacgcaccttattggtcggtgtgattaaaccagagagcccggccaccgcggcagcgattctggccagcaaaaacccggcgcaaacctggcatgattacgaacaatccaacggcaaactgaagctgaacgtaccggcggatatccctgctgccttgatgaggacgctgaatatcaatcagcagctaatggatgacctcggtgctaacgccactccggctatttactatatgaataaagacaacatgctgcagcaggtagtaggattacccgataaagaaaaactgcaggtgatgatgggggaaagccagcagtaaaaaataacccatttccgccaggtgcttaaggacaaaaaaggatctggcggaacacgattggttggtatacatttagtagggattaattgtatatttagctttaataatgatatttgatggcatcgccacaaatgtataacggtaagaaataataatccgttcgcctcgatgcaacataaacaggacgttaagcatggccaacctttatgacttaaaaaaattcgatctaaacctgttggttatcttcgagtgcatttatcagcaccttagcattagtaaagcggcagagacgctgtttattaccccttctgcggtcagtcagtcgctgcagagattacgtaatcaattaaacgaccctctatttgtgcgttctggtaaaggaattaccccgacaaccgtgggcatgaacttacatcaccatctggaaaaaaacctcaaccaattagaaaaaacaattaacatcgccaatcattccgagttgagtaaacgatttgttatttatagtccacagcttcttatatcaccggggacaatggatttaattaacaaattacacatggatcctaatctgcaaatcgatcaccgcgatctactcctgtcgccagaaagcgtcgaagacctgatggcctaccgtaaagcggatctgatctatagcattacgccactatcaaaccacagcacgatttgtcagccttttcaggaactagaaattgcgctggtttgtcgggagaaccatccgcgggcggaattgcttaattcatacgaaaatatttcccgcgagggatttacgctttacgtctcaaccgatccgaatgtaaaagcattccagcagcacaaaagtgaactcatgccagaacggagagtcgcgtttcgcagcaactctctgatcgctattttaacgacaattaatcaaagcgatcttattggctttatcccgaagcatgctttgaattattttggcgcgtcatttaaatttcgtgaaatcacattacccgaccccgtccctccagtaatggcctatatgatttataatcgttcatccttgaataatcccaaattcgctgactttatatctcagaacgcggctattaattgatttgtcatcataaacatattctctctgtgaatatgtttatgtgaattacatttctcccacttaaaacattaccatttcatattaaccttacccttaatgtgttctacactacccgtgaaagcgcatccatcacattaaaggattaatggtagtgtcattgataaaaattccattacccgagtccgtattccaggccagtcagcagcggatacagtgggtattagaaaatttttcacgtatctgcatttcattctccggtggcaaggattcaacgaccatgctgcacctggcggcgcttggcgcgcggaaaatgggcaaaaaattcagcgtgctgtttatcgactgggaggcgcaattttcctgcaccattcagcattgcgaaaatatccgtgccgaataccaggatgtcattgaaaaattttattgggttgccctaccgctgaccacgcaaaattcgctgacccaattttcgccagagtggcaatgctgggagccgggtgtcaactgggtacgccagccgcccgctgacgccattaccgatcccggctatttcccgttttatagcagcggaatgagcttcgaagagttcgttcgtgatttcgccgactggttttcacaaaaccgcccggcggcgatgatggtgggtatccgggcagatgaatcgcttaatcgcttcatgaccatctcatcgcagcgcaaactgcgctttgccgacgataaaccctggaccacgtcggcgccgggcggtcatacctggtacatctacccgatttatgactggaaaaccgctgatatctggacctggtttagcaaaagcggcctggcctacaaccctctttacgatctgatgtatcaggccggggtgccgctgcgctatatgcggatttgcgaacccttcggcccggagcagcgccaggggctctggctgtaccacgtgctggaatctgaacgttgggcagccatttgccagcgcgtaaacggcgtgcacagcggcggcatttacgcaggatacgacaacaaattttacggccatcgcaaactcgataaacccgagcaccatagttggaagagttacgccttgttcctgctggatagcatgccgcgtccaactgccgagcattatcgtaataaaattgcggtctatctgcattggtatcaaaaacagggaatggaagatatccccgatagccaggagagcgacatcggcacccgggatatcccttcatggcggcgcgtctgtaaagtgttattaaacaatgattactggtgtcgccagctctcatttagcccaaccaaagccacccgttataaaaactactgcgagcgcataagtaaaaaacgccaacaatggggactgttatgcaacaacgactaatcacccaaatagaagcgtatctggctacgctgtcggaagaggaaaaaatcgacgcactgaatcactttcgccaggccctgcaccgccatagcccctttcacaaccagccggtcgactgcgtgctatgggttaaacaggaagaagtcagccccaacgattacaacccgaacaaccttgcgccgccggaaaaacgtctgttattaacctcgctggaggccaatggtttcacgcaaccgatcgtggtgcagagtcagcagccaaaacgctataccatcgttgacggttttcaccgccacgagctggcaggcagtaggacatcgttgaaaaaacagctcaagggatatttgccagtgacctgtctgacagcaaacagccacccccgcgatgccctgatggccgccactattcgccataaccgggcgcgcgggcgccatcagatccacgcgatgtcggaaattgtccgcgagctggccaatctcggctggagcaattgtaaaatcagcaaagagctggggatggatgccgatgaagtactccgcctgaagcaaattaacggtctggccgagatgttcgccgaccgtcaattttctcaggcgtggacggtgaaatagctacaggcgacgcagtcggtctgccgccgccagcagggtctccggctgcttggcgaagcacaggcgaatcagcttatgcgggaacggatcggcgcaaaataccgataaggggatcgccgccacgccaacgtcagtggtcaaccagcgacagaagctaacgtcatcaaggtcagagatggcgctatagtcggccagcaagaagtaggtcccttcacaaggcaaaatctccagccggctatcgcgtagcgcatcgataaacagatcccgacgctgtcgataaaacgcaggtagctcgcggtagtgctccggctgcgcgcgcagcatatccgccagcgccaactgagccggcgtattgacggcaaacgtcaaatactggtgcaccttacgcagctcggcgctgatggcggcaggcgccacgcaataccccactttccagccggtcatgtgaaaggttttaccgaaagaagagaccgccaccgcccgctcccgcagctgcggatgggccagcacgctggcatgcccctgctctgcaaaacaaatgtgctcatacacttcgtcgctgataacgtagatttcccgttcggcgatcgcctgccacaacgcggcaaaatcttcccgctgccaaacggtagctgatggattatgtggcgtattaagaatgaccaaacgggtgcggtcacttaatgtggcggcaaactgctgccagtcaacgcggaaatgtggcggctgcagagcaatccgtttcagcacgccgccggaaagttctaccgccggcgcgtagctgtcatagctcgggtcaaagcagatcgcctcatcgcccgccctcaccagcgcggtaatcgccgcatacagcgcttcagtcgcgccggcagtcacggtcacttcgctattagcatccgggcgatagccataaagctcggcggttttatcggcaatggcttcgcgcagcgccggtacgccggtcatcggagcatactggttggctccctgggcgacatgccacgccaaccgttcctgtaaatagcgcgggccgtcaaaatccgggaaaccttgtgatagattgatggcctgatgctgctgcgccagcgcgctcatctgagtaaaaatggtggtgcctaatgcagggagtttactctcaggaatcagtggcttattgctcattctctttgttccgattgtaatgctgttgttgaagccactataacacgatgttaatatttggcaatcaagacgcttagacgtctaaatgctaacgttatttcgcttgccgcaggcaggcggcaaaccgacgccaccggcagcacggcgcactatccactctggagataccatgatccgcgctatcgtgaccgatattgaaggcaccaccagcgacattcgcttcgtccataatgtcttattcccctacgcccgcgagcggctggccgcttttgtcagcgcgcagcagtatgtcgagccggtcagtaccattctcgaaagtctgcgtatggaaatcgccgccccgaagccagcaccgcagcgcttatcgatacgctattccgcttcatggacgaggatcgtaaatccacggcgctaaaagcgctgcagggcattatctggcgcgagggctatctgaacggtgattttaccggccatctatatcccgatgttcttccggcgctggagaagtggcagtcgatgggcattgatttatatgtatattcctcaggctcggttgccgcgcagaaattgttatttggctacagcgacgaaggtgatattactcatctcttcagcggctatttcgataccctggtcggcgccaaacgcgaagttcaatcctatcgcactatcgctgagcaactggggcatagcccggcgagcattctgttcctctctgatatccatcaggaactggacgccgccgaagcggcaggtttacgcaccttgcaactggtacgcggcgaccgcgatccggccagccatcatccacaggttcagcgttttgacgacatcgacccggagcaacttcccgcatgagcgaattaactattttttccgttaacgacgccagccatccgcgctggcacagcagcaacgccgaagaaatccaacagcaattgcgcgcaaaaggggtgcgcttcgagcgctggcaggccgatcgctacctgggcccggcgccaaccgctgaaaccgttattgcggcctatcagcacgcgattgataaactggtggctgaaaaaggctaccaaagctgggatgtcattagtctgcgagcggataatccgcaaaaagaggcgctgcgggcgaaattcctcaatgagcatacccatggcgaagacgaagtgcgcttctttgtcgaaggcgccgggctgttttgtctacatatcggcgatgaagtttttcaggtgctgtgtgaaaagaacgatctgatctccgtcccggcgaataccccacactggttcgatatggggtcggagccgaatttcaccgccattcgtatttttgacaacccggaaggctggatagcgcacttcaccggcgatgctatcgccgatgcctatccgcgcttaccctaacctttatgcatagcggcggcgcagcagctcgcattcgaagagaaattcgagcccttccagctgacgccgcgcctcgctaacatccctgccccaacaggttaaaccgtggccgcggatcaaaaatccataacgtaaaggatgacggcgggcatacacttcaacccgcgccgccagcgcctcaatatcctgatcgttatcaaaaatcgccaccggtacgctatcgagatggctctgctgcccgctcagcgttttttgcatttcatagccctgcagctgcagggtatcgctgctttcaagacgtgagagcaccgtagcgtgcacgctatgcacgtgcagcacgacgttcgcttccggaaacagacgataaaccagcgtatgcaacccggtctccgccgacggtttacgtcccgacggtgcgctattgctggcgatgtccacctgcaaaaaatcgtcgctggtcaggctgcccttatcgcgccccgattcgcttaaccaacaccagcgcgcatcctcgcgtactgacatattgccgccggtcgccggcgcccacccttttgcgccaatccagtgacaggtggtcaccagttgtgcgagtcgctcttgccacataatcgttccttatcactgttaaccgttacgccagcggcgcaaaaataccgtccgccacctgctgtggcgtgaccacgccgctatccagcacccaaccgctgattaacgcggctggcgtcacatcaaaggccgggttgtaaaccggcgcgttttctggggcccactgcacggcgccaaagctgccttttacgccggtcacctcttgcgccgcacgctgttcaatcgggattgccgcgccgtccgggcagtagcgatcgagagtggtttgcggcgccgccacgtagaaaggaatacgatgatagtgagccagcaccgccagcgaataggtcccaattttattcgccacgtcgccgttggcggcgatccgatccgcaccgacccataccgcatcaaccagcccttgcgccatcaggctggcggccattgagtcggtaataagctgatacggcacgcccagctcccccaattcccaggcggtcaggcgcccgccctgcagcagcggccgcgtctcgtcgacccagacgttagccaccttacctcgttggtgggccaaagcgataacccccagcgcggtgccaacccccgccgtcgccaggccaccggtattacagtgggtcaacaaacggctacccggcgttaccagcgcattgccagcttcggcaatgctggcgcacagctgtttatcttccgcaatcaggcgtagcgcttcgctctccagcgcctgcgggtagtcttcctgtgccagcgcctgcttcatacgatcgagattattcatcagattgaccgccgtcggccgcgccgcgcgcaatgtttccagcgcctgagtgagctcgtcgcgggaatgaccgcgctgggctaacagcgccaacagcaggctggcggagagaccaatcaacggcgcgcctcgcacccgcagggcatgaatatggtccaccagcagcgcaacgttatccgccgccagccagcgtttttcctgcggcaatgcctgttgatcgagaataaaaagctgattttcgcttacccgcaggctggtggtctgtagtgtctgcatatcgttaaatccctgttgcgttgttgtatcacattgtgtcaggatgaaatccagatgtatagacgtctgaacggcttaattcagcacttttgaggatcgaggcaatgtcgcaataccataccttcacggccagcgatgcggtggcttacgcacaacaatttggcgggctcgacgatccgtctgagctggtgtcggcgcaggaggtaggcgacggcaatctcaatctggtgttcaaaattttcgatgctcagggcgtgagccggattattgttaagcaggcgctgccctacgtgcgctgcgtcggcgaatcctggccgctgaccctcgaccgcgcgcgcctcgaagcacagaccctggtcgcccactatcagcacagcccgcagcatacggtacacattcttcattttgatcccgctctggcggtgatggtaatggaggacctttccgatcaccgtatctggcgcggcgagcttatcggcaacgtctactatccgcaggcagcaggccagttgggcgaatatctggcgcagacgctgttccacaccagcgatttctatctccatccgcatgagaaaaaagcgcaggtggcgcaatttatcaatccggaaatgtgcgagatcaccgaggatctgttttttaacgatccgtatcagatccacgagcgcaataactacccggcagagctggaagaagatgttgccgccctgcgtgaggacgctcagcttaaactggctgtcgcggcgctgaagcaccgctttttctcacaggccgaagccctgctgcacggcgatattcatagcggctccatcttcgtcgctgaaaatagccttaaagccatcgatgccgaatttggctatttcggtccaatcggttttgacgtagggacggccattggcaatttgctgcttaactattgcggtctacctggccatctcggcattcgcgatgccgccgccgcgcgcgaacagcggctcaacgatattcagaccttgtggcataccttcagcgagcgtttccaggcgttagcgaccgagaaaacccgcgatgcggcgctggcctgccccggttacgcctcagtattcctcaaaaaggtctggcgcgatgccattggattctgcggaactgaactgatacgccgcagcgtcgggctttcacacgtcgccgatatcgattcgattcaggacacggccatgcgccacgaatgcctgcgccacgcaattacgctcggcaaagcgctgatcgtcattgccgagcgtatcgatagcgtggacgaacttatcgcccgcgtacgtcagtacagctaaccgcgtgattatttatgttgggcttccagcgtggcaaaccacggggcaataaaatcttcggtctgccccagccagggattattttccccagcgacgccacgttgaccgccccggctgtgccgccagcagcgcctgcggaatggccgccgctttgaaatcgtaggtagccggggtgctttccccggcaatcttattggcaatcaagcgcacgttagtggcgccgatgagttttggatcgaccgccacgctaaccttccacgggctaccggcctcccgcatcagctgtaaatcctgattggaaatatcgatgctgtagagtttgatttcgctgcgcccgttttctttaagcgccttataggccccctggctaaaggcatcccacgtccccagatggcgtcaattttacctttaggatacttagccaaaattgcgccaaccttgttagcggtgtcaccctgcacgtcggatgaaacggcgccgatagactccagctctttaatccccggattttgttttagcagcgtctggtaggccgcctggcggcgctccattggcgggaagccggccacccacagcttgataatgttggccttgccgttgaagtcttttaccagttggccaaaagagagttctgtcaacgaggcgtcatcctgctggctaaccgtcacgccggggatggatccctgcaccgcggtatcgaacaccgcgactttgattccggcatcgaccgcctttttcaccagcgcggttgagtagggatcgcgcccctgggaaagaataataccgtcgtatttctggctaatggcctgattgacgaaatcctggaacttcgcgtcatcaccgttgctcaggaaagcgctgactttaaaaccgagctttttaccttcctgaatcgccccggcgacaaactgggtagtgttatcgtcagaaccgagatttcgaatcaccgcgatgcggatcgggccgttgtgctcagcgatcgccgccggaatcggcgttggggtctgcgccagcgctgccgttgactgcagcaggcccagcgccatgagagaaagtgctatctttttcattttgtttaccctgtaaaatgttaggtacggcgctgaaaataggtcagtgccagcgcgccagccagcaccagtcctttaataatgtccatcgcgtaatacggcaccgagagcatcaccagaccattggaaagcacgccgaggatcaccgctcccaccaacgtccccaacgcattcggtttgccggagcccgccagcgaaaagccgatccacgccgccgcaaccgcatccatcaggtaaccgccgccggcgttcacctgggaagaaccaatccttgatgccagcagaatgccgcccagcccggccaacaacgaggcaatcacgtaggccgccactttatagcgcgtgatgcgcaggccggagagtctcgccgcctccgggttgccgccaatggcgtacatccgccgcccgtgggtggtgaacgacagcgccagctgtgcgatcagcgttaccaccagcatgataatgacgatggtcggcacctgccccagcgcgccaaacgtcgccgggatcgtgccttcagccatatcgccgctcggcaacaccatattttcggtgatcgaaccgccgtagctgtaggtcatcgctacgccctgaatcacaaacaggctggcgagcgtggcgagcatgtcaggaatgcgcagcaccacgatcagaaacgcgttgaataaccccaccagcgtacagagcgcgagggtaatcagaatggcttcagtggtgcccaggccgtgccagacaaacaacgaaaccactaacgcattcgccaacgaggccgtcgaccccaccgacagatcaaagccgccgatggtgagcgaaatcgacaccccaatggcaatcaccgtcacgatagcgatggagcgcagaatgttgatgatgttaaagggatcaagaaagttatctgaggctaaaccaaagacgccaaccagcagcaccacggtcagcaacatgccccatttatagagaaaatcgaaaaaccgctgacggcccgataccgtcgcgttgactgccagggccttgctcacgctgccgctcctccggtggagtaataaagaattgtctcttcccgcgcctcggcaccgggaatttccgccacaatacgtccatcccacaacacgcagatgcgatcgcacaggcccaccagctcggaaaattcgccggaggcgtaaatcacgccccggccctcccgcgccaggccatcaatcaactgaaacagatcggttttcgctttcacgtctacccctttcgtcggctcgtcgaaaatcagcacgtttgcgctgccgcgcaaccatttgccgatggccactttttgctgattaccgccggagagacggcgcagtgtctgccccggcccggtggcgcgcacgccgatacgggcaataacctcctgcgcccaccgccacgcttgccgatggccgaacaggctccagcgcgaaaagctgttatcggcgctgaccgccagattcatggcgatcgcctcatcgatgaatatcccctctttacgccgctcttccggcaccagcgccaggccctggaggacggaatcggccggatcgcgcggccgccacggccggccattcagttcgccgtggcgcaggcggcttttgctggcgccgaataaggctttgcagagttctgttttccccgcgcccgctaagccggcgatgccgagaatttcccccttatgcaggcgtagcgagatatcctgcaacagcgcctcgtcatgcaaaccgtcaacctgcaacagcacctcttcgccgtgcggcggacgcgcaggcgggaaaatatcgctcagctcgtgaccgagcattttttcgacgatctgctcgccgctgagctcggccatcgggccgctttcgattaaacggccatcgcgcagcaccgtcaaagtgtcgcaaatcgctttcagttcatggatacgatgcgaaataaaaaccacgccgatcccctgctgctgcagacgacgaaccaccgcaaataagcgttcgctttcgtgctgatccaagggcgcggtgggttcatcaagaatcaaaaaacggcagtggtgcgacagtgcgcgagccagcagaatttgctgcttttcggcaagggtacagctatcgattgaacgtcgaacgtccagtgcaatatcaagctgcgccagcgcttcgcgcgcctgctgacgcacccgcgaccagcgaaaaaccgcccccggttcagccagcctgtccagcatgatgttttccgcaatgctcagccccgggaccagcgcaacatccacctcctgctgtaccagatggatccccagttgctttgcatcgcgcggagaacgaatgctgaccggctggttattgatcgcgacttcgccttcgtaatcggcatgcgtcccgcacaacaccgccatcagcgtcgatttgccagcgccgttggcgccggtcagcgcatgcaccgttccgcccttaagggtaaacgccaccttgctcagcgcctgaaagccggaaaaggccaggctaatgttatgcatctcaaggcgattcacgctcatcaccctccccagggcaattaatattctgatttaacgaatttttcacagccgccgatgcctgacaactgcgtaaaaagcataagataaaaccaaataatattagccatctggatgtccagacataacatcaggttagcccaacccccataaggagcgcttcccgccctggcagcgctttagcctgccggtgacgttaacccctgacgctttgcgcgcgacgtttgagaaggtggaatacttcagccgttaatcacccagaccatctatacctaatgatgattctcaccactctcgtaacgaggtcatcatgcagatcgatttaacaggtaagaaggcgctggttaccggcgccagccgtgggttgggtcgcgctattgcgctgtcgctggcgcgcgccggcgccgatgtggttattacgtatgaaaaatcggccgataaagcccaggcagtcgccgatgaaattaaggcgctgggtcggtacagcgaagcggtgcaggcagacagcgccagcgcgcaggccattcaggatgccgtcgcccatgcagcccgggccctcggcgggctggacattctggtcaacaacgctggcatcgcccgcggcggtccactggaatccatgacgctggcggacattgacgaccttatcaacgtcaatattcgtggggtggtcatcgctatccaggaagcgctggtgcatatgtccgatggcggacggatcatcaacatcggcagctgtctggccaaccgcgtagccatgccgggcatcgcggtttacgccatgactaagtccgccctcaactccctgacccgtggcctggcgcgtgatttaggcccccgcggcattaccgttaaccttgtccacccagggccgaccaacagcgatatgaacccggaagacggggaacaggcggaagcccagcgccagatgattgcgctcggtcactacggccagccgcaagacatcgccgcggcagtcaccttcctggccagcccggccgccggacagatctccggtacggggctggacgtggatggcggtttgaacgcctgatcgcctattttctgcaagcctctgtcgcccgacagaggccttcccgcaccgcctcgacgggttgcgttttgcctcttacctgcgtttacagatggcagagattgacgacgaaaccgacgacgatctggaacatattgaaatcgaacacgattgctatgatgacgtaatgctgccaggtgaagtatgcgacgtgatgcataaagaaaatcagcctctacttaccaaaaataggctagcagcacttcgccccgcccttgccgccgtagcgcgcgtcctggcgttcgcgaaagaactcttcataggtcatcggcgtctgatccgggtgggttattcgcatatgctcgacgtagttatcgtaatccggcacgccgatcatcatcttcgccgcctgacccagatattttccggcttttgaaagggtatcgaacataatgagtttctcgcttatttccctcaccccagccctctcccacagggagagggaggagaagaaaggtaggctaaacaggttaatgcgcgcgcttcgcctgcgccgttaaggtctgcgcatccgcgggcatcgcttcatacggcgtctctttcgccgtcggtttatcctctttcaacgccgccagcgcggttttaatcgagaacagcgccagaaccaccaccacaatcataaagaagatagtcagcccggcatcgagacggttattaaacaccagctgcgccagctgagattccgtatactgcggcggaatagtaccgctgtcgatcatcgcctggaatttattggcgatggccaggaaaccgactttggtatccgggctaaacgacttctgccagccggcagtcaacgtacaaatcagcaaccagcttgtcggcagcagcgccacccacgcgtagcgctggcgtttcatcttgaacagtaccaccgcgcacagcatcagcgccatccctgccagcatctggttggcaataccgaacagcggccacagggtattaataccgcccagcgggtcaactaccccctgatgcaagaagtagccccacgccaggacgcacagcgcggtcgccagcaggttagccggcagcgagctggtttttttcaacccggggctaatcacgcccagcagatcctgcagcatgaatcgcgccgcgcgggtgcccgcatcaactgccgtcaggataaacagcgcctcaaacagaatggcgaagtggtaccagaaagagacatccatcagtccgcccagagagccgtggagaatgtaagccatccccaccgccagcgtcggcgcgccgccggcgcgtgaaataatcgactgttcgcccacctcattggctatttgattcagcgtatccggggtaatgctaaagccccagccgctcactacctgcgccgccgaggccacgacgtcagtcgtccccgccggcgccagcaccgccatcgggctgttcatcgcaaagtagacgcccggatcgatgatacaggccgccaccagcgccataatggcgacgaaggactccatcaacatgccgccgtagccgataaagcaggcctgcccttcgttggccaacattttcggcgtggtgccggaggagatcagcgcgtggaagccggaaaccgcgccgcaggcgatggtgataaacaggaacgggaacaggttaccggtccataccgggccggtgccgtcgacgaactttgtcagcgccggcatggtcagcgtcgggcgcataatcaggatgccaatcgccagaccaacgatggtgccaattttcaggaacgtggagagatagtcgcgcggcgccagcagcagccagaccggcagtaccgcagcaataaaaccgtaacccaccagaatccaggtcagctgtacgccggtgtaatcaaaccacggcgcccaggtcgggctttccgccacccagccgccagaaatgatcgcgaacaccagcatcaccaggcctattaccgacacctcgccgatgcgcccagggcgcaggtagcgaatatagatgcccataaaaatcgccagcgggatggtaaaggcgacggtatatgtcccccacggactgtgggtcaacgccttcaccacaatcatcgccagtaccgcgaggatgatcaccatgatcataaagcaggccaccagcgccagtacgccagcggttggccccatctcctctttaaccaattcgccaagcgaacggccatcgcgacgggtcgaaacaaacagcaccataaagtcctgcacggcgccggccagtactacgccggcgaggatccagatcatccccggcaggtagcccatctgcgcggcaagcaccgggccaaccagcggccctgcgccggcaatcgccgcaaaatggtgaccgaacagcacttttttgtcggtcggaacatagtcgagaccgtcgttatgtcgtaccgccggcgtcatccgcgttgggtcaacgccgaggacggttttggcgatatacaggccgtagaaacgatacgcgatcagataaacgcagaccgccgcgacaacaatccacagcgcatttatctgctcaccccggtttaaggcgatatagccgagggcaaaggctccgatcacggagagcagtgtccagataaggtatttccctgaattattcattgttgtggtccaccggtagggtaatcaggatgttacagtttgtttctagaacacaacgcagagtttaacaacttcgaaacagcgcagatgccatgccgcggcggagatttgtctcacattgctagcgagatcacttaagacaggaaaataaatgaaaggattaccgtgaacggtgccgtttttttgtcgggtggcgccttacccgacctacagatccgtagcccggctcagcgcagcgcaagccggggaattagcagcttcttagccaagcaccgcggttcccagacgacaggtgcagcagcgccgccccttttcgtcatacaccacaatttcccagctctgactctggcggccaagatgcagcggtcggcattcgccgcgcactttaccgctggagaccggacgatggtgggtagcgttaagctcggtgcccaccacacattgtccttcttcggtcatcagccaaccggccatcgagcccagcgtctccgccagcgccgcggaagcgccgccgtgcagcaggccaaacggctgatgcgtgcgcgcatccaccggcatctccgcctccagcagcgcctcctccagccggatgtagacaatacccagatgcgccaccatagtgttttcgctactggcgttcagcgccgcaagcgtgagctctcgtttccaggccatttacgccccaaggtcgagccgccatcaaccacaatatcctgcagcgtaatatggctggcgtgagaagaggcgaggaacaaaatggtattggcgatctcctgcggacgggcgattttgcccagcgggatcccaagcttaaattgctcgccaaatccgcggatccgctgctgttcagcatcgtcattgacccacagggtacgttgcatatcggtgtcggtggagcccggcgataccaggttgcagcgcacgccgctgcctgccagctcaagtccgacggtcaacgccaggcttttcagcgccgctttcgaggcgccataggcgctcatgccaatacgcggcgtatgcgcggcatcggaagcgacggtgacgatcgccccgccccgctgacggcggaactgcgccatcgtctgctgaaacagattaaacgcgccgccgacgttcacggcgaaggtttgctgccagtcttccgcgctcaattgatcggtcgcccccatgcgcaggatcccggccgcattcaccagcacgtccagtcgttcaatatcgttgagcagacgcgcgcaaacgtcgcgtacctggtcggcatcggcgacgtccagcgtttcggtggtaaacgggtagctttcgccgtcaaaggcaaggtcgaaaccggtgacgttggccccggcctcgacgaaagccaacgcggtggcatagccaatgcctttacctgcgccggtcacccacacggtctggccgtgaaaatccagcgccgccattatttcacctcgcgggagagcagcgcccaccaggcgtcgatggtcgggtttttcgccagcataacgaagtcgatatcgccgtgcactttgcgccagcgggcggccagcgccatcatacgcaccgaatccagaccgtagtcgatcaggttttcatcatccagcggttcgtcggattcgtcgagcagcggcagaattagcgcgcgcagcgccgctttggaggccggcagcggcaacaattcttcggtcatcaccacccgtccggaacggccggcgacgtatttcagcgccatcaaatgctcttcgcggctgaaatctgccagcgcgtcggcgacaaagaacggtttgatatcgcgcataaaagcgtcggtggcggtggtcatgcagccgatatgggcgtaaacgccggtgatgatcagctggtcgcgaccggtctctttcagcatctcttcaagcggcgagcgatgaaacgcgctgtagcgccatttcaccaacaccgtatcctgttcatccggcgccagcgcggcaattacctgttgctgttccggcgagcgagtcaaccccggccccacatatcattcagcagggcgcggtcttcatcgctctgctctttcggctgggcggtgtagtacaccggaatgccgttttgtttgcagaagtcgcgcagggcggcgacattggccaccactttttccatcatcgcgctgttttcgccccagaagttgaggaaatactcctgcatatcatggatcagcagcgcggcgcgcgacggctcaaaggcccagttaactttgttggccggaatatcgctggcttccggcagcgcgtaagcctgtaatttagggattgccattttctgttctccttcagcccagcttgccttcggccagccactgacgtaattgttttttatcgactttgcccaccggcgtcagcggcagcgcggcaacgcactccacgcgatccggcaatttaaattccgccacgccctgctcgcgcaggaaacggcgcaccgcgacggcgcgcagcggcgatgtcaccaccagataagcgcagctcttctcgccaagaagattgtcttcaatgctaaccagcgcggcgtggatcaccgcctcatggcgcaacagcaggttttcaatctcttcagcggcgatcttctcgccgccgcggttgatctgatctttttcccgcccctgaacggtgatatagccatcttcatcgatcgaaatcagatcgccggagcagtaaaatccatcggcatcaaaagcttcagcgttatgttgcggactgttgtaatagccgcggaaggtataagggccgcgggtcatcagacggcctacttcgccgcgcggcagcgggttaccgtcggcatccgccacccacacttcgtcgtcagggcacatcgggcaaccctgggtgttgataatccgctgcgggctatcgttgaggcgggtgtagttaaccagcccttccgccatgccgaacacctgctgcagctgacagccgatttccgccgggatacgcgcggcgagcgtcgcggacaggcgcgctccaccaacctgcagcagttgcagcgattgcagttgcgcgttgctgccccattcatgaatagcctgcagccacaggctgaccgccggcggcaccagcgacgcgacgttaatctgatgtttttcgatcagcgggaaacagagcgtggcgctcgggtcggcggcgaggatcacccgcccgccggcgaggaagacgcccagtgatcccggcgagctcatcgcatagttgtgcgccgccggcagcgcgttgagatagcgcgtatcggcgttaataccgcagatctcgttgctgcggcggatactgtagtcgtaatcgttatgggtacgcgggataagcttcggcgtcccggtgctgccgccggagagctggaaaaaagccacttcgtcagccggcgtcggattggcgacaaagttatccgccgtgcggttaatttccgttgccaggtcgcgctcgccgccatcgttacgcagcagcgcgacgcgcagcgaaggatgctcagcgataaaaccatggagaaagctatcgtcagcaaacagcgcgtgctcgcgatcggcaatcagcagcgagggtttaatttgcgcggcgtaggcgttgagttcgctgcgctgatggctaaacaaggcgttaaccggagcgacaccgatacgcagcagcgcaaagaaggtaatgtaaaactcggcgacgttgccaagctgcaccagcgcggtttctccgcgtttgagtccctgatgctgcagggaggacgcgaggttatccaccagttggttaaactggcgatagctaatctgccgctcgccgtcaataatcgccacggcgtcattgtccgcatgacgagtaatcagattggttaacggcagatcctgccagtagcctttttgacgatagcgggccgcaaactcttccggccaacgggtaaatgcaatcatccttgcctcttaattcaagccaaatacgttgagcatggtggtgagtttgacgccagtttcacgccattcgcccagcggcgaagaggccgggacgatacccgcgccggcaaacaggcgcagcgagcgttgatgtaagcgcgcgcagcggatggtcaccacccattcgccgttgccttcgtcatcgcaccagccgacaatcccgccaaacagctggcgatcgaacggttcgagctcggcaattaaccgcttcgccacctggtgcgggaagccgctcagcgctggggtcgggtgcagcaggcaggccagcgacatggcgttttcttccgccaacgccgtaccttcgatcggcgtcgccagatgccagagcgtcggggtggtaatcagctgcggcgactccggtagcgacagatgactgctgcgcgggccaagcacactcttcattgcctgcgtcaccagctcgtgctcatggcgatctttgcccgacgccagcagcttgttacccgcttcccggtccagcacatcgtcaggctggcggcgggcagaaccggccagcggcagcgaactgaagtgcagcccttctttacgcagcaggagttccgggctggcgcccagcagcacatcaccattggagagtggaacatggaagttaaagctcgccgggttctgggcgatcagccgctccagcagcgcgccgctatcaacccgatcgcgagtcgtaatatcaatcagccttgatagcaccactttgtcgacttcgggagtcgccgtcagcgcggcggcgcgttccaccatcgccaaaaactcgtcctgttccgggatctccagacgatcgacaacatccatcgccttgagcggcgccgcgtaacgcgcggactgctgtttgtcggtacgggaaaaggtttcccagcgttcgggaatatagagctcggaaggctgattggtgtcgaacggaatcgccccgaccatgaccggcttacggatccccgccgcgcgagcctcggcaaatgcggccgccattttctgctggaactcgccgtttagtgaatcaccgccgacggcaggctgggaaaaacggctaaaacagccggtggtgctgaagctgcggtacggcgacataaagaagaagctttgcggcgacagggtctgcgttttttcctgtacatcctcagccagtgacgtttccatatcatcctccaaaaacgataaagatattaagaataattatcatttatatttttgttggctaacctaaaaggtattgctctccttgtcaaccgcacaaacagcaggttatgcgacttaaacttgcatccgggcaacacaatgttgaaaatgagacgtatttactacaacttactcaggatgcgaattcgtgaattttgccactttttgccgtcgtactttactcgccagcgggctgtgccttttaggaattacctcagcgctggcggcggactggccgcgtcagatcgccgatagccgcggcactcatacgctggaaagccagccgctgcgcatagtgtcaaccagcgtcaccctcaccggctcgctgctggctattgatgcgccggtggtcgccagcggcgcgaccacgccgaataatcgcgtggcagacgcgcagggctttctgcgccagtggggcgatgttgctaaaaaacgcaaactagcgcggctctatattggcgaacccagcgccgaagcggtggcggcgcagatgccggatctgatcctgattagcgccaccgggggagattccgcgctggcgctgtacgaccagctttcaaccatcgcgccaacgcttatcatcaactacgacgataaaagctggcagacgcttcttacccaattagggcatattaccggtcacgaaaagcaggcgaacgcgcgcattgccgaattcaataaacagctcgtttcgttaaaagcaaaattgaaacttccgccgcagccggtcaccgcgctggtttataccgccgcggcgcatagcgccaatatctggacgccggaatcagcgcaaggccagatactggaacagttaggctttaagctggcgacgctgccgggtggccttcatgccagccagagccaaggtaagcgtcacgacatcgtgcagttgggcggcgagaatctggcggcgggtatcaacggcgaaagcctgttcctgttcgccggcgaccagaaagacgccggggcaatttacgctaatccgctgcttgcgcatttaccagccgttgccgctaagcgcgtttatccgctgggaaccgaaaccttccgtctggactactacagcgccatgctggtactgcagcgtttatccgcactctttgcctgagtctctcttcccggcgtcagccgccgggatctcatttcatctcatcaaacacatcatctatctgttacaaaagactttttatttcttttggtctttgctatctcatccattcctcatgcgaaacatcatcgtttgaggtgttgttttgtgattagccatcgtcgccaccttccctgaatatctgccccacaccacttgaggtggacattcaactcagaaggaacttaccgtgaccactagcaaattgctcaagggcgataccctgaccgaaaccagcaacgccgcagatggttttatcccggcaactgaagtcagcaactacagctatacgtcagaccgcgtcgccaaaccggtctataacaaatacaaaagcgcgaccaacaaaccaaaggtcttcggttactacaccgactggtctcagtacgatggccgcctgcagggcagcgatgcgaaagataaccgcggacgcggctacgacctgaccaacgtctcccctaccgcttacgataaaatcatcgttggcttcgtcggcgtaaccggcttccataaagtggatggtcagtggcgtgatgtggtggccgaaggggctgagcagtgcggcaaagtcaaatatgaaccgacattccttgacccgtggggcgacttccagtcttacgtgaacgttggccacagcgtcagcggctgggatgtcgatccgaaaaccgtaacccagacaaacaccaaaggtctgctcggcggtctgcgtgacctgcaggcgaaagccaaacagcagggccacaatctggtgctgtccatgagcatcggcggctggagcatgagtaacggtttccatgaaacagcggcatctgattcctcgcgtaaaaccttcgcgaaaggggtagtgaagctgttcaaacagttcccgatgttcagcgaagtggatatcgactgggaatacccgaatgccgaaggcgccggcaacccatacggcccggaagatggcgataactacgccctgttgattgccgaactgcgtaagcaactggattccgccggcctgagcgatgtcaaaatctctatcgccagctctgccgtggtgaagacctttgattattccaacatcaaagcgctactgagcgccggtctgtatggcatcaacgtcatgacttatgacttcttcggtactccgtgggcggagagcatcacccaccacaccaacctgaaagcccttgaacaaggcggctgggcggtcaacactatcgttgaacatctgctggcggaaggtttcccggctgagcgcatcaacatcggttatgccggttatacccgtaacggccgcaacgctgagctggaatccctgtccccactcaaaggcacctataacccgggtaacggcaccaccgtcgggacctttgaatccggtaccaacgaatggtatgacgtcatttataactacctggatctggaaaaccagaaagggcgtaacggctttaacgtttataccgaccaggtggctgacgctgatttcctctacaatccggaatccaagctgtttatgtcgctggatacccgcgcaccgtcaaagccaaaggggaatacgctgccagcctggggctgggcggtctgtttacctggactatcgaccatgataacggcgtgctggttaacgccgcccgtgaaggtctgggctacgaaatcgcctctgaagttatcgatatggagccgttctatttcgaaggcattaacgttgtgccagctgatgaacaagaagacgataagtcagaagatgagccaactgaaccgacggtaaaccatgcgccggaagcggcaattgaaatgatggtcgtagggggttcccgcgttcgcctgtctggtgaaaaatcgtctgatgaagacagcgacgagttgagctacagctggggcgtgccggcagcgattgatgttgcggataaaaccgccgcggttattgagttcgatgttccggaagtcaccgcggataccgagttcactttcactctgttcgttcgcgatacctggggcgaaccgtcaacccagcagcgctttattctgtcggtggtcgtcgcctcccagggtgaaccaagcgctgacgagccagccgatgagcctgctgatgaagcggctgacgatgaaaaagacgccgatgacgtgccggcacaggaagacgatgttgtaccatctgacgaaaccacgccttatccgctgtgggatgccaaaaccgtttatggcggcaactggggtacctttgaaaccgtgagctggaaaggccacaactatcaggtgaaatggtggtctcagggcaaccagcctgacctgtactgcggccagttcgacgtctggaaagacctcggcgcatactaagtgatataagtgaagccaggccccggagcaatccggggcctttttgctattgtcgcgcttagctttcgctgaccatctccggacgctgaaaacgacgtagctcgcgcaataagccaatcagtaatacgccaacaatcaccagcgcccagccgctggcgctggctgaagccaccggggtcattaccgctcctaatcccccagcagcgccgcgccaatagcatcgccggtcacgttctgcgcggtccacaggccattaatgcgccccaacatgtgttccggcgtttgcgtctggatcaacgtgtactgtagcagcgagcttatcgcgctcagccatccaaacagcgccagacagagcgcgcccagcgcccagaacggcatcacgctgaacagcgcaatcgccacaaacgaccctaccgtcgttatcagcatcaacgcccctggcttcgcggtatgcgccagttgtccgctggttaacgcccccagcgccgcgccaagcggaatggcggcatacaacaggccaatctgcgaatttgacatctgccagccttccgccagcgccggataaagcacccgcaccgcgctggccatcgtcaacaagccgccgagcagcgcaatgccgccaataagcgggctattaaagagaaatttgagccccgccagcaacgatttcagcggatgctcgcgcggctgcggcggtggcggcagcagcggcaggcgtagcagcgtcagggtggtaatgaacgtccccgccgccgccaggccatagttccaggccacgccgccggtcgccagcaatagcccgccgatcatcggcgatatcaccgaaccgagacgcacggtcagcatggtgatcgctccggcctgcatcaggttttcgcggccgactaaagccggcgttgccgccagaagcgcggtcacgcccaaagaggcgaagaagccatcccagatccccagcaggtaaattgccgccagcgagggttccggtagcatagcgttcaggcacaggccgacgaagcccacgccgcaggtgccacgcgccagcaggatcaggcgtttgcgttcataacggtcggccagcacgccgccgaccatcagcccaatgaacatcgaacagccggtcaacatcaccgagagccccacctgccaggtcgaatgggtcatcatctggatttgtaccgggatcgccacgcctagcaggccaagcgacaggatagaaataaatctagcgataaagacggcgcggaacgccggatgggtgcgcaggaggctgacatcaagcagccgggaaggtcggttcatgcaagggccttgtcgttatttttcataccatttttatggtttctcatggtaacatacctgaataaaatcgataacgataattaatatcattatcatgtcagggatttgaactatgtcgttttctacgaccacggtgcgcgccgtcgccgtgcctggtctcttgttacttttagctctcgcgattgcgctcagcctgcttatcggcgccaaacctctgccgccttctgtgattgtcgatgccttctccggcagttgtcagagcgccgactgtactatcgtgctggatgcccgcctgccgcgtacgctggccggattgctggccggctgcgcgcttggcctcgccggcgcgctaatgcaaaccctcacccgtaacccgttggccgacccgggcctgcttggcgtcaactccggcgccagcttcgccatcgtagtcggcgcggcgctgttgggtatcacttcgccgcaggagcagctgctgatggccttttgcggcgccttcgccgcgtcgctactggtcgcgtttaccggcagccagggcggcggccagcttagcccggtgcgcctgaccctcgcgggcgtagcgctggcggcggtcctggaaggcctgtccaacggcatcgccctgctcaacccggacgtgtatgaccaactgcgcttctggcaagccggctcgctggatattcgcaccctgcaaacgctgaaaatcgtcctgctgccggtgctgattgccgccgtggtaaccctttttctcagccgggcgctgaacagcctgagtctcggcgccgacaccgccaccgcgctcggcagccgggtcgcgcgcacccagttaatcggcctgctggcgataaccgtcctgtgcggcagcgcgacggcgctggtcggccctatcgcctttatcggcctgatgatgccgcatatggcgcgctggctggtgggggcggatcaccgctggtcattgccggttacgctgttcgccacccccgccctgttgctgtttgccgacgtgcttggccgcctgttggtgcctggtgaactgcgcgtttcggtggtcagcgcctttatcggcgcgccggtgctgatctggctggttcgccgccagccgcgaggaggtgcgctgtgatggctccctcccgccgcctgatgttctgctgcctgctgctgatttccgccagcttgctggtgtccctgctcggtctgggtaatggcctggtgccgctcagccttgaacaggtggtttccgcgctactcggcgacgcgccgcgcaacgtcagcatggtggtcaccgaatggcgtctgccgcgcgtgctgatggcactgctgatcggcgccgggcttggcgtcagcggcgccatttttcagtcattgatgcgtaacccgctgggtagcccggacgtgatgggtttcaacaccggcgcctggagcggcgtgctggtagcgatggtgatgttcggccagaacctgaccgccatcgcgctggcggcgatgcttggcggcgtgctgacctcgctggtggtatggctgctggcgtggcgcaacggcatagaaaccttccgcctgatcattatcggcatcggcgtgcgcgccatgctggtggcattcaatacctggctgctgctgcgcgcgtcgcttgagaccgccctttccgccgggttgtggaatgccggttcgctcaacggcctgacgtggggcaaaacctggccatcggcgccgctgatcctgttgatgttggcgtgcagcgcgctgctggcgcggcggatgcgactgctggagatgggcgacgataccgcctgcgcgctgggggttcgagtcgaacgttcgcgcctgctgctgatgctggtggcggtgctgctgaccgcttccgccaccgcgctggccgggcctatttctttcgtcgcgctggtggcgccgcatatcgcccggcggataagcggcaccgcacgttgggggttaacccaatcggcgctatgcggcgcgctgctgctggcgctggccgattactgcgcccagcgtctgttcatgccttatcagttaccggtaggggtggtcaccgtcagtcttggcggtatctacctcatcgcgttattaattcaggagtcccgcaaaaaatgaccgctgtaacttcccgtttgcgcggcgaccagttgaccctggcctacggcaaaaagaccatcgccgaatcgctgaatgtcactattcctgacggccatttcacggcgattatcggccccaacggctgtggtaaatcaaccctgctgcgtacccttagccgtctgatgacgccgtccagcggacacgtttatctcgacggcgagcagatccagcgctacgccagtaaagaggtggcgaagcggatcggcctgctggcgcagaatgccaccacgcccggcgatatcaccgtacaagagctggtggcgcgcgggcgctatccgcaccagccgatgtttacccgttggcgtaaagaagacgaagcagcggtaaataacgcgatgcgggcgacgggtattgtcgacctagcgctgcagagcgtggataccctctccggcggccagcgccagcgggcgtggattgcaatggtactggcgcaggagacggcgattatgctgcttgatgagccgacgacctggctggacatcagccatcagatcgacctgctggaactgctaagcgagctgaatcgcgagaagggatatacgctggcggcggtactgcacgatctcaatcaggcctgtcgttacgccacccatctgatcgccctgcgcgacggtaagatcgttgccgaaggcgcgccgaaagagatcgtcacggcggatctaattgagcgtatctacggtctgcgctgcacgatcatcgacgatccggtggcgcatacgccgctggtagtgccgctgggtcgccgataatcttttctataccatctcaaccatcgcattcccggcatgcgctacgctgagccgggctaccaaaaacgggtagcccgagctctaccgttaccccagaatctcccgcactaccgggcctatcgcttcaaaggcctgcggcgagataatctcgacgtgggcgcagttctggctgaacacctccagctcgccaacccatggcccccatgcgacctgcggatccatccctttctggcgcgttttctccgccacaaatagcgttgccttgccgtcaaacttcgcgctgtgcgcggtcgtcaacaggcgcaccgcatcggcgtagttaccttcgatcgcgctgaacagctcgccggaagcctgcccctgctgagcagcaagaaacgcttcgcgctcgcgggcgatttccgccagcacctcgggatccaggccgttcgcctctttctccgcccagttttgcgtctccggcggccaggtatccagcaggccgaggaacgccacctcttcgccgcgctggcgtaaacgggcggcaatcccctgcgccagcgttccgccgagcgaataaccaaacagatagtaaggcccatgcggctgctgcgctaaaagcgtgcgcagatggtgctcgcagacttcgtcgaggttggcggcggaggccattggccccgtcggacgcggcgactgaataccggtaattgaccagcgcgggttaagataacgcgccagcacgctgaactgccaggcaaaaccggaggccggatggaagcagaacagcgtcggaccgtcgctctcgcgcagcggcaacagcgcatcgaagcccaggcgctgcgcctgctcgtcgctcaggtcggaagccagcagcgcgctcagcttgccgacggtcgaagcgaccatcacctgccccggcgtcacctgccgcgccagctcgcggctaagctgcgccgccagccgcatcgccagcagcgaatggccaccgagggcgaagaaatcggcgtcgatgtcatttacctcgcagcccagcagctggctgaacgccgcggcaacggccatttcgatagccgattgcggcgggcgaccgctgcgctcgctgcttaaggaggggagcggtagcgctttacggtccagcttaccgttggcgctgagcgggaaggattccagctggattaacaccaccggcaccatgtgcggcggcagctgttcgctaagacgggccttcagcgccgccacgtccagcggctggccggactcgctcaccagataaccgacgagctggcgggcatcgccgccggtggccgccgcctgattgaagacgcaggcgtggcacaccgcctgcgcgacgtccggcaacgccgccatcacccggtcgatctcgccaagctcaatgcgctggccgcgaattttcaactgatcgtcgctgcggccaagatactctaccgccccgttatccagccagcgcgccacatcgccggtgcggtacatgcgctcgccgggggcaaacgggtcggcaataaagcggctggcggtcagatccgggcggcccatatacccctgcgccagctgaatgcccgttaagtacaaatcacccgccacgcccggcggaaccgggcgcatggcggcatcaagaatacgtaatccagtgttccataccggccagccgatgggcacgctggtgccggttaccgccgccagctctggcccacaggcgggataccagctgacgtccaccgccgcttccgtcggcccgtacaggttatgcagcggagcgccggttaagcgctcccattcgcgacacagttccgtcggcagcgcttcgccgctacagaaaacgcgttttagcgtccggcaggaagacacattatcgctatccagcgaggcgacaaacgccgccagcatcgacggaacaaagtgggtggtggtcacgccgtactgcgcgaagaaccgctgcatcgcctgtggatcgcgatgcgcctccggcgccgccatcaccagctgggcgccggtcataaacggccaccagaattcccataccgagacatcaaagctgcacggcgtcttctgcgccaccacatcggcggcggttaacggatagtgattttgcatccacagcaggcggttcacgatggcggtctgcccgaccatcacccctttcggccgtccggtggaaccggaggtgaagatgatatacgcggtatgttccggttttgacagcgccagcggcgtatcatcttcagcagccagcggctgctcataacacaagctggtcagtcccggaatatcgctaaaacgggccagttgatcgtcagaggtaatcagcagcgaaggccgcgcatcttccagcatcatccgcagacgatcatccgggtagccggtgtccagcggcagccaggcggcgccggcttcgacaatgccgtgcagcgccagcgtcaggaacaccgaacgcggtaaggcaaccgccacgctatcccccggcttcacgccgcgttgccgcagcaggttggccagcgccaccacctgttggcgcatttcgcggtagctaaagcgccagttggcatccgccagcgccggggcatccggcgttttccgcgcctgttccgccaccagcgcgctgagggtagtggtcggcagtggcatcgcggtattgttgatcaatgccagctgcgcgccttcttccgccgacagcatctccgcctcgccgcagcgtagcgccgggttggcagcgaactgcgccagcagcgcggtcagccgcgacacgtggcggttcagcgtcgcctcatcataacgcgctttattggcgaggatctccagcgacagaccgccgcgttcgtccgggaacagtgccagctcgaggtcattcaccgggccggtggcgagggtatgcgtctgcgcctgcacgtcgtcgatatccaactggtaatcaaagactttgatgttcagcaccgggccaaacagcggttcgtcgcccgccgctttaccgctatcgcggacaatttgctcggcatcgtagcgctgatggcggcgcatttttttcagttgtccggagagacgcgtcgccagttgcgccagcgtctcctgcgcgtcgatattcaccgccagcggcagtacgttgagtaccgggccggtggcggtcagcgccgccgatcccatgcggcgcataaagataaagccagccgcgtaatccattcggccgcacaaccgccccagccacaacgtcgtcagcgccaacgccagatcggcgcgctggcactgcggcgcgctggccgcgagctggctgaagacagccggatcggcctccagtttcaggcgccagatatcgctgctggtcgcccgcccggccagcggcgcgtctgatagcgaggccggagacggcaacgcctgacgctgcgcctgccagaaggctttatcgcgctgccacgcctcgctgccgtagtagcgctgatactcttccaccacttcggcgaacggcgtaaacggtgaatccggcgtctcttcgccgcgttgccaggcacgataaatagcggcgatctggcgggtaatggccgggaaactaaaaccatcgaccagtaaatggtgatagcgctgataccagtaccagcagtcgtcgccaactcgcatgagctgatggcagaccagcggattaccgctgtcgacgcgcagattctgcccgagatcgctttgcatcagcgtcagcgcggacatatgcggatcggcctgctggcgcaggtcaacgctttgcggctcggcaaactcgcgcgcgtcatcaacccactgccacgcttcgccattatcttcgcaaaagcgcatgctcagggtatcggcctgcttaagcccggcgacgatcgccttactcagcagcgccggatcaagattgccgcgcagttcaacatagtgggcaacgctccaggcgccgggtagcgtggagaggcgttcagccatccaaattcccggctgcgccgcaaccagcggtaaacgtgtactcatcgaaagctcctcaggaggcgtagtgcgctgggataagggttgaccagttggcggcaagccaggcgttacacgcctctaatgactgcggcggacactccaccgtccagcctgtcggcagcgcgcagtgatgcggccacaaactatattgcccctgtgcgttgcgcagaatgtaaaactgcccttgcggattgtcgaaggggttgctgaattgcatctctcactcctcattaagcgcgtgttgttgcccgcggcgcaaaggctgccacagctggataagcccggacgtcagcccgccgcgccagcatagcgcgtcatgaccgccgtcaacctggcgccagaaaacggacggcgtgctctgccgcagctgcgcgaaaagcgcctggttggcgcgaaaaataatcggctcgcgcacgccggcttccagccagatacgtagcccctgcggtcgaagctcgccgcgctgcagttgttcaagtatcaatcccggctggctactgccgcgctgcggccaccagtacgaccccgactggctcagaacgcagccaaaacgctgcggccagtggagcgcggcatacatcgccgccagaccgccgaagctctgccccgcaactaccgtccggtcggcgcgatcgctgaatggcgccacggcctgcaccagcggcagcagttcttcctgtaccgccagccagaaatcacgattgcagggcagctccacgccgcggtgttgattgtcgataacgtcgatcagcacatagaccgccggcggcaggcggccttcccgcgtcagccccgccagcggcgcaaagacaggcatgctttcggcccagaactggccgtcaagcaggaccgccagcgggcgatccgccccactgccggtggtgtaaatccacactcgtcgctggtttcctaatcgctgactgcgccattcaatacagcgcggcgctggcgaaaccggctcgcgataatgccaacccggctgttccggcgcctgcggcagttccagcgctgagaccgcgtggccgcgtcccccttccagctttgcggattgcggggatcggcaaccgcccgcggcagcagtttgcgccagccttcgcgcagcagcgcgcggtccggcgcttcaccgttaaagagctgcggggaaaaatcgtcgtcgcgttcggagggaataaaacagtagctgccgcgccagctggcggggagcgtggtttgccagcaccaggcatcggtacctgggatgcgctgcagggtttgcggcgccgcgttgtggtgatgatcggtgacgccggtaatgtaaatccacactcgccgaatcggcgacgtggtttcgctgcctgccggatcgcgccaccagaaggtcacccgatatgcgtcgcccagcgcctctgtctgcgggccggcgatcccccgccaccagtcgtcacttcccgttatttgcattccgtcagtaaccctatgtttaccgtgatttttatcaacaaaggtaatatttattgataatattattgataactatttgcatttgcaatagcgtattaacgcgcctatgggtagcgcgtcttctcattacattaaatcaaggtcagagagggtcttttcagagcgtttggctcggtcggctacggaaagcgttcaccttctactggctacatttatgccgcctcctctcccggtgggaagggcttctggggaaagcggcaaagaaaagcggaactgacttacaatgaataacaggattaagtccctggccttaatggtcaatctgggtatctacggggtggcattcccgctgtgcgcggcggaagaaaccaccgacagtaaacaagccgccggtgaagaaacgatggtggtcaccgccgaggtgcaaaacctacaggcgccgggcgtttccaccattaccgccgatgaaattcgcaaacgtccgccggcgcgcgacgtctctgaaatcatccgtaccatgccgggcgtcaacctgaccggcaactccaccagcggccagcgcggcaacaatcgccagattgatattcgcggtatgggcccggaaaacactttaatcctgattgatggtaagcccgtgaccagccgtaactctgttcgtctcggctggcgcggcgaacgcgacacccgcggtgataccagctgggtaccgccggaaatgatcgaacgtatagacgttatccgcggcccggcggcggcgcgttacggtaacggcgcggcgggcggcgtggtcaacatcattacgaaaaaattcgacaaccagtggcatggttcgtggaacgcctacatgaacatgccggagcataaagacgaaggcgcgaccaagcgtaccgactttagcctcagcggcccgctgggcggcgatttcagcttccgcatgtacggcaacctcgataaaacccaggctgacgcctgggatatcaaccagggccatcagtctgaacgtaccggcatttacgccgataccctgcccgccgggcgtgaaggggtagaaaacaaaaacatcaacggcgtggtgcgctgggatttcgcgccgatgcagtcgctggagtttgaagctggctatagccgccagggcaacctgtacgccggtgatacgcaaaacaccaacagcaacgatctggtgaaagagaactacggtaaagagaccaaccgtctctatcgcaatacttactccgtgacctggaacggcggctgggataacggcgtgaccaccagcaactgggcacagtacgaacacacccgcaactcgcgtaaaggcgaaggcctggcgggcggcaccgaggggatcttcagcagcaaccagttctcggatatcgatctctccgacgtgatgctgcacagcgaagtcaatattccgttcgatctgtgggttaaccagaacctgacgctgggtaccgaatggaaccagcagcgcatgaaggacaacgcctctaatacccaggaactctccggcggtgaaatcccgggctacgacagcaccggccgcagcccctattcaaaagcggaaatcttctcgctgttcgccgagaacaacatggaagtgaccgataccaccatgctgacgccggcgctgcgtttcgatcaccacagcatcgttggtaataactggagcccatcgctgaacctgtcgcagggtctgggcgacgactttaccctgaaaatgggtatcgctcgcgcctataaagcgccgagcctgtatcaaaccaaccccaactatattctctacagtaaaggccagggctgctatgcgagtaaatccggctgctatctgcaagggaatgatgacttaaaagcagagaccagcatcaacaaagagatcggcctggagttcaaacgcgacggctggctggcgggcgtcacctggttccgtaacgattaccgcaacaagattgaagcaggctatgctccggtttataccaacggcaaaggcaccgatctgtacaaatgggaaaacgtgccgaaagcggtagttgaagggctggaaggcacgttgaacgtgccggtcagcgagacggtgaactggaccaacaacatcacctacatgctgcagagtaagaacaaagagaccggcgatcgcctgtcgattattccggaatacacgctgaactcaacgctgagctggcaggtttatcaggacgtttctgtgcaatcgaccttcacctggtacggcaagcaggaaccgaagaagtacaactataaaggccagccggtcaccggcagcgagaagaacgaggtcagcccgtatagcatcctcggcctgagcgcgacctgggacgtgaccaaaaacgtcagcctgaccggcggcgtggataacgtcttcgacaagcgccactggcgcgcgggtaacgcccaaaccaccggcggcgacaaaggttatatgtacggcgctggcgcggagacctataacgaatccggccgtacctggtatatgagcgtcaacacccacttctgataatattaatgtctgacgccctccccgccgggagggcgtttttttcaacactgcgctattttctgtacccgcgcgacaatcgacgccgcgtcaaaaccgtgatgttgacgcagccatccgcgatcggcggccgccgcatactcgccatccgggatccccagacgctgcaaggcaatccccgtacccgcttccgccagcacttcggcgaccaggctccccagcccgccattgacgttatgttcttcgacggtaataactgaacggcatgactgcagcgccgccagcagcgccgcggtatcgcagggacgaatcgacggcacgctgaccactttcgcctcaatgccgaggtcggcaagctgctgcgccgcctccaccgcttcgtgcacggttgaaccggtcgccaccagcgccaccgctgcgccttcgcgcagggtcagcaccgcgccgggcacaaaacggtacgcttcgtcatgcaactccggaagcgccttgccgtcaaggcggatataaaccggcccctgatacgccagggcgtagtcgataatctgccgacattcgcgcggcgtggagggggcgaaaatctggatattgccgaaaccgcgcattaccgccaggtcgtcaatagcatggtgggtactggccaatgggccatagctggccccggcgttaaggccaaagagcttgacgttggtgttgttgtagcagacatcgactttaatctgctcgttggcgcgggagacaaggaacggcgcggcgttacaggtcaccgccactttaccgccgagcgccagccccgcggcggtgccgaccatgctctgttcagcgatcccgacgttaaccagccgtccggggaactgcttaataaagggagcgatcttggccgttgaggtggagtccgcgaccaccggcaccagatcgacgcccttttccaccgcggcgataaacgcctcgaccatcacgttcgccaggtgttctgcattactcatctttcagttcctccagcgccagtgcgatttcctcgcctttcggcacccggtggtgccactccgggcgcccctggataaaggagatgcccgcgcccttcgtggtgttggcaataatgacgttaggtttaccgttctgctgcagcccttcgatagccgcgaccaccgaggccatatcgttgccgtcgcattcgctgacctccatgccgaaggcgcgccatttatcggccagcggatcggtattcataatttcgcgggttggcccggccagctgaagattgttcttatcattaataatgaccaggttatcgaggccgtaatgggccgccgccagcgccgcctcccagttactgccttccgccagttcgccgtcgccggtgattaaaaagatgcggcgggagctgttgcttttcttcgcggccagcgccagccccaccgcaacaggcaaaccgtggcccagcgcgccggtgtttagctcaatacccggcgttttctgccgcaccgggtggccaggaaggtgcgagttcgcatgctggtaggtctccagccattcgatcgggaagaaacccgcttccgccagtacgcagtagtagcagcccaccgcatggcctttcgactggatataaatatcgcgctgcgggtcgtcaaggcgatcgggcgccgcattgagctcgcggaaatagagcgcggttaacaattcgacctgcgagagatcggccccggtgtgaccgccagccggactattggcgtttaagcggacaatgtggcggcgcacggcgcgcgctttgcgctcaagcgtctggacatcaaatctgtagggattcatttaatacctctgaatttattttcaatatggaatatttattccgtaagggactaaaaaaaccagatatccccatgccggtggtaagccttccgccacagcaccgtactcaggaacattctgcctcccgctccaggcgaagcccggataaactcgttgactcaaagtcatcctgaatatatattcaattatgattctttattcgattatggcctggctgttttgtttttgtccatagtcgattttgatgagtggtaaaaatttgaccatcatcacacttaagtgtgattttttttcgcgtatgatagaagtcactacgataatggctgcagctaaacgcctgaagaaaggcgataaatgattttcgaggataaatatggctaagcaggatgaacaacggctattggttaagattgccacgctttactatctggaaggacgaaagcagtctgatatcgcccaacttctctcgctgtctcagtcatttgtctctcgcgcgattacccgctgccaaaaagagggcgtcgtcaaaatcagcgtcgtgcagccatcgaatatctttctcaatctcgaaaaggggcttgaggatcgctacgggcttaaacaggcggtggtagtcgataccgaagaagaggccagcgaccataccatcaagcgggcgataggttcagccgccgcgcactacctggaaacccgcctgcggccaaaagatctgattggcgtctcttcatggagctccaccatccgcgcaatggttgatgaggttcacgcgcaaaatctgaaggccagcggagtcatccaactgcttggcggcgttgggcccaacggcaacgtgcaggcgacgatcctcacccagacgctggcccagcgtcttaactgcgatgcctggctgctgccatcgcaaagcatcgaaggttccatggaagaacgcaaccgcctgctggccagcaaagatgtcgccgacgtggtttcccgctttgacgaggtcgatattgccattgtcggcattggaattctcgaaccttcccagttgctgaaaacgtcgggtaactattatcacgaagatatgctgcaggtgctggcggcgcgcggcgcggttggcgatatctgcctgcactactacgacaaatacggccagccggtgttacgcgaagatgaagatccggtgatcggcatggcgctggaaaaagtcaaaaaatgtccgaacgtggtcgcgctggccggcggcaccgacaaagtcgcggcaattaaaggcgcgcttaccggcggctatatcgatgttttaatcaccgattaccccaccgccagactcctggttagcgactaactcgccgcattttcccgcctcgtcaatccctggcgctgtttttttagcagcagggattgtaaaataaatcattgtaattcaataagttaatccattcacttctccatcttcgtgtcctgttcccaatctgcgaaatgtgattgccagcacaattgatgatttttcaggtagcccatcaccgggtttgtggcttaaggtatcaaataaataatcactatcgaatatatattcagtgataaaaaatgataacgatatgtcacatcatggcctgcgtagacgcatgcaatggccggagataaaccgttctccgccgttccaggacaatgtgtgaccgaggagagcatcatatgcaggcgacagccaaagagttcatcattgcgctggatgaaggcaccactaacgcgaaagccgtagtgctggacggcaaaggcaaggttagcgtcaaattctcgcagccgctggcgatccaaacccctcgcgaaggttgggtggaacaatccggcgaggcgctggtggcggcctcgctggcggtgatcgccaaagcggtggctcacgtcggcgcggaaaacgtcgcggcgctggctatcagcaatcaacgcgaaaccgccatcgcctggtatcgcgccagcggcaaacccattaatgccgccatcacctggcaatgcacccgcagcgccgcattctgcgacacgctgcgtcgcgatcgtcaggaacagcgcattaagcacgccaccggtctgccgattgcgccgctgttttccgcctccaaaatgcgctggctgctggacgccactcccgatggctatcagcttgccgcacgcggcgagatttgcctcggcactatcgacagctggctgctgtggaatttaaccggcggacaatccttcttttgcgattactccaacgcagcccgcacccaattgctgaatctgcaccgcggcgagtgggatgatgaaatgctgacgctgtttggtattccacgcgcggcgctgccggagatcaaaccgtcgagcggcctgttcggctacaccaaagggctgacggcgatccccgacggtatcccggtgatggcgatgattggcgactcccacgccgcgctattcggccacgcgcttggcgaagctggctgtgtgaaagccacctacggcaccggctcctcggtgatggcgccggtcaaatcggcccagtgcgatattgccgccctggcgaccaccgtcgcctggcacgatggcgaccaactggtgtgggggctggaaggcaacattccccataccggcgatgcggtagcatggatggctgacagcaccgggctgagcgaactctccgccgccgacctggcccacgagctgaataccctgcccgcctccgtcgattcgaccttaggggtctacttcgtaccggcgctgacagggctcggcgccccctggtgggatgacagcgcccgcggggtaatctgcggtctgagccgcggcgtcaagcgcgcgcacctgatccgcgcggcgctggagtccattacctatcaaatcgccgacgtggtggcggcaatgcgtcagcacaatgaattcaccctgacggcgttaatggtcgacggcggcccaaccaacaacgactggctgatgcaataccaggccgacctgctcggctgcccggtgatgcgcagcgatatcccggaactgtccgccatcggcgcggcgcttctggcgcgaaaagccctcactccgggtgaaactgccgacctgcaagccttcttaaccgaacacagcgcttttcaacccgacatggcccgccaccagcgcctacagcagcgctggcgggagtggcgccatgcggtaaacagaacattatggaaaccggattcgccggcctgacgcccatcgggcgacagattaggcgacgaaccttaataacccactacaggagaaccccggcccataacgatgtatcgcgctccccgaatttattcaggggaaatttcagaccgtaaaatcctgcccgctcaggggctcatttgttcgaatataaaaatataggaacagagtcatgaaattacgtttaactcttttaaccgctgcgaccctgaccgccttttcctttgccgcgcatagcgccgaaaaaggcaccattatgataatggttaactcattggataatccttattacgcctcggaagccaaaggcgccagcgaaaaagcacaggccctcggttataaaacgaccgtgctatcgcatggcgaagatgtcaaaaagcaaaatgagctgattgataccgccattggtaaaaaggtgcagggaattattctcgataacgccgactccaccgccagcgtcgccgccattgaaaaagccaaaaaagcgggtattccagtggtattaattaaccgtgaaattccggttgatgatgtcgcgctggaacaaattacccacaataacttccaggcgggttcagaagtcgccaacgtatttgttgagaaaatggcggaaaaaggcaaatacgccgaactgacctgcaacctcgccgataataactgcgtcacccgttctaaatccttccatcaggtgattgaccagtacccggatatggtcagcgtggcaaaacaggatgccaaaggcaccctcatcgacggcaaacgcataatggatagcattctccaggctcacccggacgtcaaaggggtgatctgcggcaacggcccggtggcacttggcgccatcgcggcgctaaaagcggccaatcgtaatgatgtgatcgtcgtcggtatcgacggcagcaacgacgaacgcgatgcggtgaaggccggtacgctacaggcgaccgtgatgctccaggcgcaggccatcgccgcccagggcgttaccgatctggataactacctgcaaaaaggcgagaagccggcgaagcagcgcgtgatgttccgcggcattctgattacccaggataacgcagataaagttcaggacttcaacatcaagtcctgagttcgggtggttgcgcccctgcgggggcgcagaggagagcattatgtacaagaaaacctgtctggcgctggctgttctggcgcttggcggctgccgcatcgtctcgcagcaggagctggcagacctgaaatccccgcccaatccgcatatggcgaacatcgataaaacctggcagcagagcatcgtgccgcaggtggtcgccaacgcccgcccggcggcggagttgatgagcgcgctgaaggcgcaaaaagatatcgatagcgcctgtaaagcgctgggctaccgcgcccaggacgaaaacccgtgcatcttttacgttaaggtggcgggcgccgtcagcaagctggatagcgcctcgcgcagcggcaaaatgaccctcgccgacggcagcatcggtaatgtggtggtgcagattggccctaccctgcgcggcaccctgctgcgcgacggttaccgcgacgccagctaccaggactttaacgaccaggtgctgtttggcgaatacagcaaaaatattaatagtcaggcggtcaaaatgattcaggcggccaacctgaaaaccggcgacaacgtagaagtgtatggcgtcttttcagcctgggatattccacaaactattccggaaatcaccccggcgaaaatcgttcatccgggaggtcaataatatgacgccgcaagatatcgtcgctccccaaccagtcgaatctgaagtgattatcgaaacccgcggtctttcgcgcatttatcccggcgtgatcgcgctggataacgtgaattaccgggtctatcgaaataaggttaacgttctgatcggagaaaatggtgcgggtaaatccaccatgatgaaaatgcttgccggcgttgaaacgccctcctccggtcaaattattcttgatggcgaggcggtgactttaaactctacccatcaggcagagaaattcggcatcagcattattttccaggaactgaatttattccccaatatgaatgtgatggacaacatattcatggctaatgaattctttcagaaaggacgcatcaacgaaaaatatcaatatgcgttagccaaatcgctactggagcggctggagctcgacgtcgatccctacacgctgctgggcgaactggggattggccatcagcagttggttgaaatcgcccgtgcgctatcgaaagacacccgcgtgctgattatggatgaacccacctcggcactaagccagtccgaggtcaaagtgctgtttaaggtcatcgagcagcttaagcgccgcggtgtcaccattatctatatttcgcatcgccttgaagagctgatggagattggcgacaacatcaccattttccgcgacggtcgcttcatcagcgaacgcaacgtcagcgacgccagcgtgccgtggatcattgagcagatggtcggcgacaagaaaaagcactttgattatcagcccgcgccaaaaggcaacgcggtacttgacgtcaaggggctgaccgcgctgcatccgagcggcggctacaaactcaatgatgtcacctttaccctcagcaaaggcgaagtgatcggcatttacggcctgctgggcgccgggcgcaccgagctgtttaaagggctggttggcttgatgccctgccagaacggcgaggtacatcttaacggcgaaagcatcggcaaatctcgctttcaacaccgcctgaaaaaggggctggcgctggtgccggaagaccgtcagggcgaaggcgtggtgcagatgatgtcaattcaatccaacatgacgctctctgattttagcctgcagggttttcgccgcgcctggcggtggctgaatccacagaaagaagagtcctgcgtaaaagagatgattcagcaactggcgatcaaagtgagcgacgccaatttgcccatcacctcgctgagcggcggcaatcaacaaaaagtggtgctgggtaaggcgctgatgacccagccgcaggtggtgttccttgacgaaccgacgcgcggcatcgacgtcggcgcgaaaaccgacgtctatcacctgatcggcaaaatggcccagcaggggctggcggttatgttctcctcttcggagctggatgaagtgatggcgctggccgaccgcatcctggtgatggccgatggccgcattaccgccgatttaccgcgccatgcggtgacccgcgaaaagttaatcgcggcttcaacacctcaagattaatcaggctggaatccatcatgaaccagaaatatatgatttatatgtacctgctgaaggccagaaccttcatcgccctgctgctggtgatcgcattcttcagcgtgatggtaccgaacttcctgaccgcctctaacctgctgatcatgacccagcacgtggcgattaccggcctgttggccatcggtatgacgctggtgatcctcaccggcggcattgacctgtccgtcggcgcggtggcgggtatctgcgggatggtcgcgggcgcgttgctgaccaacgggctaccgctatggaacggcgacatcatcttttttaacgtcccggaagtgatcctttgcgtcgcggtcttcggcgtgctggtggggctgattaacggcgcggtaattacccgcttcggcgtcgcgccgtttatctgcaccttagggatgatgtacgtcgcccgcggctccgccctgctgtttaacaacggcagcacctacccgaatctcaacggcatggaagcgctgggcaataccggtttcgccacgctgggctccggtaccctgcttggagtttatctgccgatctggttgatgatcggcttcctggtattgggctactggctgaccaccaaaacgccgcttggtcgctacatctacgctattggcggcaacgaatccgccgctcgcctcgccggcgtaccgatcgtcaaagctaaaattttcgtctacgccttctccggcctgtgcgctgccttcgtcggcttgatcgtcgcctctcagctacaaaccgcgcacccgatgaccggcaacatgtttgagatggacgccatcggcgccaccgtgctcggcggaaccgcgctggcaggaggccgcggccgggtgaccggctcgattatcggcgccttcgtgatcgtcttccttgccgacggcatggtgatgatgggagttagcgacttctggcagatggtcattaaaggcctggtgatcgtcaccgccgttgtcgtcgaccagttccagcagaagctgcagaacaaagtcattctgatgcgccgccacgaagagaagctggccgcgatcccccgaacggcgccacctccagctaatcggcaaccgtattcacgcattccgccgggcctggcgcccggcttatcgaaagggaaaaaatatgcaacgagatttccataataaaacagtggttatcaccggcgcttgccgcggcatcggcgcaggtattgctgagcgctttgcccgcgatggcgctaatctggtgatggtctccaacgccgagcgcgttcatgagaccgccgaaaccctgcgtcagcgttatcaggcggatattttatcgctgcaggtcgatgtgaccgacgaagcgcaggtacagtccctgtatgagcaggccgctgcgcgcttcggcaccattgacgtctccattcagaacgccggggtgatcaccatcgattactacgatcggatgccaaaagccgattttgaaaaagtgctcgcggttaacactaccggcgtgtggctgtgctgccgcgaggccgctaaatatatggtgaaacagaaccatggcagcctgattaacacctcttccggccaggggcgtcagggctttatctacacgccgcactacgccgccagcaaaatgggcgtgatcggtattacccaaagcctggcgcacgagctggcgccgtggaacatcaccgtcaacgccttctgccccggcatcattgagagcgaaatgtgggattacaacgatcgcgtgtggggagaaattctcagcaccgagcagaagcgttacggcaagggcgaactgatggcggaatgggtcgaagggatcccgatgaagcgcgccggtaagccggaagacgtagccgggctggtggccttcctcgcctccgatgatgcacgttacctcaccgggcagaccatcaatatcgatggcggtttgattatgtcctgaacattgtagcccggataaggcgctacgcgccgccatccgggaaaccgcactcccgacgttcgacactatattgaagagagtaatgactatgatcggcaaagactttgcacagcagctgtttaacctgcaggagcgcgtcgctttcgtgaccggcgccggcagcggtatcggccaaaccatcgcctgcgcactcgccagcgccggcgcgagggtggtctgttttgatcttcgcgacgacggcgggctggcggaaacggtcagccatattgaatccatcggcggtcaggcctgttcttataccggcgatgtccgccagcttgctgacctgcgcgccggcgttgcgctggccaaaagccgctatggccgcctcgatatcgccgttaacgccgccgggatcgccaatgccaatccggccctggagatggaaagcgagcagtggcagcgggttatcgacatcaacctcaccggcgtatggaactcctgcaaagcagaagcggaattgatgctggagtctggcggcgggtcgattatcaatatcgcctcgatgtcggggattatcgttaaccgtggcctcgatcaggcgcattacaactgttcgaaagccggcgttattcatctgtcgaaaagcctggccatggagtgggttgataaagggatccgcgtcaacaccatcagccccggctataccgccacgccgatgaatacccgcccggagatggtgcatcagacccgcgagtttgaaagccagactccaatgcagcgcatggcgaaggtagaagagatggccggcccggcgctgttcctcgccagcgacgccgcctcattctgcaccggcgtggatctggtggtcgacggcgggtttgtctgctggtaaaaccggtcttgccccggctaacgatgcacaagccggggcgttttctttccacacgcacctctcccggcgctgttttcttcagccgtattgcacatctatgcagagcacatgatggatcatgaagatggctcatgcagtattgaaattaactctctttcactcactcaatgactctggcaaaaatagtcttcagcaactgcagacaatatgaatgctactgaataataaatccagataaatcgcaaggtcattctgggaatgtgaaatacctgcatttttatatcagaacccagggtggaaagagacgatgacagactttacctttacgattaaacgtagtcgttttgatgaacactataacccggcgaaaaatacgcgtattaccaccaattttgccaatctggcgcggggcgaaaaccgtcagcagaacctgcgcaacacgctggcgatgattgacaatcgctttaataacctggtgcagtgggataatccgcacggcgaccgttattccgtcgaactcgatattatttcagtcgagatgaatattaccgataacggccagaatgcggcattcccggtgattgagattctgcaaaccaatattattgataaagccaccaatacgcgaatcgaaggtattgtcgggaataacttctcctcttatgtgcgcgattatgattttagcgtattactgccggaatataataaagataaagcaacattcagcgtgccggaaaattatggcgttctgcatggcaatattttcaaacatttcacacgctctgccgaataccatgaatgttttaaaaagtcgccggtcatctgcctgagcgtttccaataagcatacctaccgccggaccggtaatcagcaccctattctcggcgtcgagtaccagcaggatggcgtggcgctgaccgaggcctattttaataagatgggcctacaggtgcgttactttatgccggccaatagcgtagcgccgctggccttcttctgcgcgggggatctgctcagcgattacagcaaccttgagcttgccagtactattagcaccatggagacgttccagaagatttatcgcccggaaatttataacgctaactccgcggccgggcagtgctatcagccgaacctgaataatcaggatcattcgtttacccggattgtttatgaccgcgaagagcgcagccgcctggcgattgaacagggcaaatttaccgaacaacagtttattaagccgtaccagcatattcttgagcaatggtcagctcattacgctctctaaatcataaaaaataaaggtcacctgtatgaaaacattgctcccgacatccaccgcaggcagtttaccgaaaccgacctggctggcgcagcccgagacgctgtggtcaccgtggaaattacagaatgaagagttagtattaggaaaacgcgatgcgctgcgtttatcgctcgacgatcagctacgcgcaggcattgatatcgtcagcgatggcgagcagacgcgtcagcactttgtcaccacctttattgaacatctcagcggcgtcgattttgagaaacggcaaacggtgagaattcgcaaccgctatgacgccagcgtgccgaccgttgtcagcgccgtcgaacgccagcagccggtgtttgtggaagatgcaaaatacctgcgtcaacttaccaacaaaccgattaaatgggccctgcctgggccaatgacgatgatcgataccctgtatgacaatcactataaaagccgtgaaaagctggcctgggaatttgccaaaattctcaaccaggaagcccgggaattagaagccgccggggtagatattattcagtttgatgaacccgcctttaacgtcttctttgatgaagtcaatgactgggggatcgccgcgctggaaagagccgttgaagggctgaaatgcgaaaccgccgtgcatatctgctatggctacggtattaaggccaataccgactggaaaaaaacgctcggctccgaatggcgccagtatgaagaggcgttcccgaaactccagacctcctctatcgatattatttcgctggagtgccacaactcgcgcgtaccgatggacctgctggagctcatccgcggcaagaaagtgatggtcggagcaatcgatgtggcgaccaacgccgttgagacgccagaagaggtggccagcacgctacgcaaagccctgcagttcgtcgacgccgacaagctctatccatcaaccaactgcggcatggcgccgttatcgcgtcaggtcgccagcggtaagctacatgcgctaagcgccggggcggaaattattcgccgggagctggcggcgaaataatcgccgcctgccgttcacttctgaaacaaggcgtcattgaaaacatgacgccatatcaaaagcgggtttacatccccggaaacgttacgctattccccggcgcttccctgtgtagatgaataaagttcaggtgtcgctcgtactggtcgagaatatcggtgatcacctgctctttgctgtaatccatcaggtcattgccctgactcccctccagcaggaaagtctcaagacggtagtaggtcgatttgccgctgcgcgcccggtaggtaaaaccaggaatcgagtactgctgcggccaaatctggtagacgaagttttgttcgtcgcccatatgcactagcagatcgaggtgaccaaggttatcgccctcttccggcggcaggcttttcagctcaacgtaagcgccgcgcagcttcagctcctgcgccacctcttccatcgccgggaagcacaccgtctccatcatctggcgggtatagcgcgtgccgggatagttcattaagcgtgacaagcgctttttccagctcagacgatcctgcacgcccagcgggcgcggcgcagtgtcgcgattggcgctttcgcggcgataatcttccaccttcaatgacttatataaccccgccatcacgaagaaaatcacaaaactgaacggtaaccccatgatcaccgtcgcgttctgtagcgcggagatgccgttagtcatcagcataccgagggtcaacaggccaatcaccaccgaccagaagatgcgcagccagttcggcgcatcgctattaatatccttcagcttcgaagtgaagttgccgagcaccagcgcgccggagtccgctgaggtaacgtaaaacagcaggccggtaatggtggcgaccgaggcgctaaaggtaaacgccggatactgcgccagcaggttatagaaaccgcgctccgggtgagcgatagcctcggcggcaaaatccgcattgccgtgaataatttcatacagcgcgctattgccgaataccgacagccacagcagggtgaaagtgaacggaataatcagcgtacccactacaaactggcgaatggtgcgcccgcgcgaaatacgcgccaggaacagaccgacaaacggcgaccacgccacccaccaggcccagaagaataacgtccagttattcatccattcaaccggtcggtcgaaggcaaagctgttaagcgtcattcccataaagcgattgacgtaatccccgacgttcaacaccagcgcattgagcaggaactcagtatcgcccataaacagaataaataagatcagcccagcgccagtaccacattgagctcggaaaggatacgaatgcccttatccacgccggaggtcaccgaaatggtggcgataatcaccgacaatacaatcagcgccgcctttgcgcccaatgaatcaggaatatggaacagcacgctcaggccgtaattgagctgcaccacgccgataccgagggtagtggcgatgccgaaaatcgtaccgatcaccgcggcgatatcgacgctgtggccgatggggccattaatctttttcccgaagataggatagagcgcggagcgaatggtgagcggcaaattataacgatagctaaagtatcccagcgccattcccatcagggcgtacatcgaccagccggtgaggccgtagtggaatagcgtccacaccatcgcctggcgcgccgcttccatggtctgccccgccccttccggcggctgcatatactgcgtgacaggttcggcgaccgagaagaacatcaggtcgataccgataccggcggcaaacagcatcgccgcccagctcagcacgctgaactccggcttcgagtgttccggccccagcttcaccgaaccaaagcgcgaacaggcaatacagacgacgaacacgatatacagcgtggcggcgagtaaataataccagccaaatgtcttagaaacccagttcagggtacggccaatccaggccgcggaaaaatcgctgaagaagatagtcatcagggaaaacaacaaaatcagtcctgcggaagtgtaaaaaaccaccggattgattttgtccttttctctgctcggcgaaaggtctgtcatccattctccttacatttattgcaactattaaaaagcaaatcggcaacaattaagacacattttatattgaacgtccaatcaaaaaccgctttaatatataaacaaatctgatgaatggagtccgggaaatgccaaaactggggatgcaatcgatacgtcagcggcagctgatcgacgccacgctggcggcgattaatgaggtcggcatgcatgacgccaccatcgcgcagatcgcccgccgggcgggcgtatcgacgggcatcatcagccactatttcaaggataaaaacggactgctggaagcgacgatgcgcgacatcaccggccagctacgccatgcggtgttacagcggctgcgggcgctacccggcgccagcgctgaacggcgtctgcgggccatcgtcgccggcaatttcgatgacagccagataagcggcgcggcgatgaaggcctggctcgccttctgggccagcagtatgcatcagccgatgctctatcgcctgcagcaggtcagcagtaagcgtttgttgtcgaacatcgtgtatgagtttcagcgtcagctaccccgcgagcaggcgcaggaagcgggttacggtctggcggcgctgatcgacggcctgtggctgagggcagcgttaagcggtaaaccgctcgacaaaacgcgtgccgaaaccctcgccgaccatttcatcagtcagtatctgccaccgacttcgcaataatggaggaaaccatgtcccgaatggccgaacagcagctttatattcacggcaagtttgtcgccgccaccagcggtaaaactttcgagaccatcaaccctgccactggggaagtgctggcaaccgtccaggccgccgggcgtgacgacgtcgaccgcgcggtaaaaagcgcccagcaggggcaaaaagtatgggcggcgatgagcgcgatggcgcgctcgcggatcctgcgtaaagcggttgatattctgcgcgaacgtaacgatgagctggcgcgtctggagacgcttgataccggcaaaccgctgagcgaaaccgccgccgttgatatcgtgaccggcgccgatgtgctggagtactacgccggattgatcccggcgctggaaggcagccagatcccgctgcgcgacagttcatttgtctacacccgccgcgagccgcttggcgtggtggccggtattggcgcctggaactacccgatccagatagcgctgtggaaatcggccccggcgctggccgccggtaacgcgatgatctttaaaccgagcgaagtcactcccctcaccgcgctgaagctggcggaaatctaccgagaagcgggtctgccggaaggagtcttcaacgtcctgccggggatcggcgccgaaaccggccagtacctgaccgagcatccggatatcgccaaaatctccttcaccggcggtgtcgccagcggcaaaaaagtcatggccaactccgccgcctcttctttaaaagaggtgaccatggagctgggcggtaaatcaccgctgattatcgcggaagatgccaacctcgacctcgccgccgatatcgccatgatggccaatttctacagctccggacaggtctgcaccaacggcacccgcgtgtttgtgcccgcgaaatttaaagccgaatttgaacacaagatcctgcagcgcgtgggccgtatccgcgccggagacctgtttgccgacgataccaatttcggcccgctggtcagcttcccgcatcgccagaatgtcctgcgctatatcgagagcggcaaaagcgaaggcgctcgcctgctgtgcggcggcgatgtgctgaaaggcgaaggcttcgataatggcgcatgggtcgctccgacggtcttcaccgactgcactgacgacatgactatcgtgcgcgaagagatcttcggaccggtgatgtcgattcttagctatgacgacgaagcggaagtgattcgtcgcgccaacgccaccgagtacggccttgccgctggcgtcgtcacgccggatttgaaccgcgctcaccgcatcatccaccagttggaagccggcatttgctggataaacagctggggagaatcgccggcggaaatgccggtcggcggctttaagcactccggcattggccgcgaaaacggcgtgatgacgctacaaagctacacccaggtaaaatccatccaggttgagatgggtcagtttcaatccatattttaaccaggaggtcatttttgcagtttgactacatcattattggcgccggctccgctggcaacgtcctcgcgacgcgtttaacggaagatcccgacaccaccgtcctgctgctggaagcgggcggtccggactatcgttttgatttccgtacccagatgcccgccgcactggctttcccgctgcagggcaaacgctacaactgggcctatgagaccgaaccggaaccgtatatgaacaaccggcgcatggagtgcggacgcggtaaagggctcggcggatcctcgctgattaacggcatgtgttacatccgcggcaacgccatggaccttgataactgggccgccgcgccggggctggaacactggagctacctggactgcctgccctattaccggaaagcggaaacccgcgacatcggccctaacgactatcacggcggcgatggtccggtgagcgtcgctacgccgaagcataacaacaacccgctgttccatgcgatggtggaagccggcgtgcaggcgggctatccgcgtactgacgatctcaacggttatcagcaggaagggtttggcccgatggatcgcaccgtgacgccgcagggacgccgtgccagcaccgcccgcggctatctcgatcaggcccgcagccgcgcgaacctgaccatccgcacccatgccatgaccgatcacattatttttgacggcaaacgcgccgttggcgtcgagtggctggaaggcgacagcagcgcgccgtcgaaagcaatggccaataaagaagtgctgctctgcgccggtgccatcgcctcgccgcaaattctgcagcgttccggcgtcggcaatccggaactactgcgccagtttgatattccgctggtccacgccctgcccggcgtcggtgaaaatctgcaggaccatcttgagatgtacctgcagtacgagtgcaaagagccggtatcgctgtacccggcgctacaatggtggaatcagccgaaaatcggcgcggaatggctgttcggcggcaccgggatcggcgccagcaaccagtttgaagcgggcggatttatccgcagccgcgaggaattcgcctggccgaatattcagtaccacttcctgccggtggcgattaactacaatggatccaatgcggttaaagagcatggtttccagtgccacgttggctcgatgcgttcaccaagccgcggtcacgtgcgtctgaaatcgcgcgacccgcatgcccatccggcaatcctgtttaactatatgtcgagcgaccaggactggcaggagttccgcgacgccatccgtattacccgcgaaatcatgaaccagccggcgctggataaatatcgcgggcgcgaaatcagccctggacttgagtgccagagcgatgccgaactggatgagtttgtgcgtaatcacgccgagaccgcgttccacccgtgcggcacctgtaagatggggtacgacgacatggcggtggtcgacggagaaggccgcgtccacggcatggaaggattgagagtcgtcgacgcgtcgattatgccgcaaattattaccggcaacctgaacgccaccactatcatgattggcgagaagatggccgatgccattcgcgggcgtcagccgttaccgcgcagctccgcggcctactatgtcgccggcgacgcgccggttcgccgctaaacgagcaggtccccggattgcgctgcgctcatccgggctaccaaatcgcgcagcgccgtagccccggtaagcggcagcgccaccggggttttctcatcccgtccgcactcactgcgcttctcctatacttgcagtttaagcggggacaggagaaagacgatgacgctacccgattttcacgtttcagcgccttttacgcttggtattgagctggagttacaggtcgtcaacccgccgggatacgacctcagccaggatgcctccacgctgattgccgatatccaacgcgaactgacggcgggagaggccaaacacgacatcaccgaaagcatgctggagatagcgaccggcatctgtcgcgatatcagccacgccaccgcacagctaggcgccatccatcaggcggtacagcgcgccgctctccatcaccacctacaaatctgcggcggcggttcgcatcctttccacgcctggcagcgtcaacaaatcagcgataacccgcgctatgtgaaaaccgtcgagcacttcggctatctggcaaagcaggcaacggtgtttggccaacatgtccacgtcggctgtcagaacggcgacgacgccatctatttgctgcacgggctgtcacgctttgtaccgcactttatcgccctcaacgccgcctcgccgtggttcgacagcaccgacagccgcttcgcctgctcgcgccttaaccgtttctcttcctatcccgataacgggccgatgccgtgggttgagaattggcaggcctttcagcgtttattccgccgcctgagctacaccagcatgatcgacagcatgaaggatctgcactgggatattcgtccaagcccggttttcggtaccgtcgaggtgcgggtgatggatacgccgctgacgataggccaggcggtgaatatcgccggatttatccagacgctggcctgttggctgttaagcgaacgaccgtttaaacatcagccagaagattatctactctaccctttcaaccgctatcaggcctgtcgttacggcctcgacggggtgataaccgatgtctggtccggcgaacaacaaagcatccgcgcgaacattctacagttagccgaccgattggcgccctttgcccataaggtgcacgccagcgcggcgctggaatcggttgtgcgccaggccaggtccaccatcagcgaagcgcagcagatgcgcgaattcatcgccaacggcggttcgctgatcggcctggtacaaaagcattgcgagatttgggcggcataaggaagcgaaacgggtatactcggcgcaggatattcaaaaggattgttcatgttattacgccgcctgctccctcttgcgcttcttcccttcaccgcctttacccatgctgcctgtacgctcaccgacccaacgctgaccttgcaaagctatacggttaatccgcagcaagagcgcatcgtgatgtactggcaaaagcaaaatggcaaagcctggggatcgctacgctcgctgcttgcggatatcaataaagacgaccgcgtccagatggcgatgaacggcgggatatacgataaggcctacgaaccgctgggcttgtatatcgaaaatggcgagcagataaagcccctcaaccgcgcctccggcggcggcaactttttcattcgccccggcggcgtattctggctgaagggccagcgggcgggaataacgcctatcaataaatttaagccatcgcctgagataacctacgccgtgcagtccgggccaatgctgattgaaaacggcgccatcaactggcggctgaagccctctgccagctcgcgcaaactgcgcaacggcgtcggcattgataagcagggacgggtggtatttatgcttagcgagcgcgaaaccaatttctacgatttcgcctgttacgcacagtccaaactccacgtgcgccagatgctctacctcgacggtacgatttcaaaaatgtatcaaaagggcggcagcataccgtggcaataccatccgttcgtcaccatgatcgcggtggaaacccaaaaacctggctaaacgaaaatggcgcccgctctatcctgaaggggcgccattcggtatcaggtaggtttacgcaaacggcgggtcagccgcttctcgacttcgaccaccaggaacatggccacgccaatcgccagggtcacgaaccagtagcgcagcggtagtgcttcggtgccgaacatgttctgcatcagcggcacatagatgatgaccagctgcatcagcaacaagacgccggtcaccagccagatgcctttgttgcgcagcaatcctttgttcagggagaagctgtcgctgctgcggcagttgatcatatagacccactgggcggtcaccagcatctgcagtagtacggtgcggatgaactcagcactgtggccgcgcggcgccagccaggcttcgagaacaaaagcggcgacggcaatcatcgaaccgacaaaagcgacgcgccagacggcgaacccatccatcacgtgctggccggtcttacgcggcggacggttcattacattgcgctcggcggcttcaaaggccaggccgaaagagagcgtggccgaggtcgccatattcatccacaaaatcagcaccggcgttagcggaataatattgcccgccagtagcgcgatgatgatcaacagtccctgcgcgaggttggtcggcatgatgaacaggatggtctttttcagattgtcgtagacgcggcgtccctccttcaccgagctggcgatggtggcgaagttgtcgtcggtgagtaccatatcggcggcttctttggtcacctcggtccctttaatgcccatggcgatgccaacatcggcctgacgcagcgccggggcgtcgttaacgccgtcaccggtcatcccgaccacttcgccgctatcctgcagcgcctttaccaggcgcagtttatgctccggactggtacgggcgaaaatatcaaactccactgccgccttcgccagctcgtcatcatccatatgctcaagctgatagccggtcatcgcctggcggctgttggcgatccccagcatctgaccgatgctcatcgccgtctgcgggtggtcgccggtgatcatcttcacgcggatcccggcggtctggcaggcgtggatcgcgtcaatcgcctccggacgcggcggatccatcattccggcaatgccgaggaataccaacccttccctcaggtcgtcgtgggtcagcgtggtgctgccgacggctgccgatttgcaggcggcggcaaccatccgtaacccctgacgggcgaagcgcgccatttcgtcttcccagtactgacggtcaaacggccttggcccctgcttgctcatctgctggccgcacagggcaaagatgacatccggcgcgccggtaatcagcacccgctcctcatcgccgatctgctgatgggtggccatatatttgtactgcgagtcgaagggtattttcgccaccaactgggtggcgaccggcgctaactgggctttcgccgccaataccttcagcgccccttcggtcgggccgccggtgataccccacaggccacgctcgtcctgaacgatctggctgtcgttgcacagatcgatggtacggaggtaggtttccaaaacgctgcccggctggaccaccaccggctcgtcgctgccctcctggaaaatgcgcccctgcggctcatagctgtcgccttcaacgcggtagcagcagtcggcggtgatgatcgctttcaccgtcatttcgttcatggtcagggtgccggtcttgtccgaacacaccacggtcatcgcgccaagcgtttcaaccgtcggcagcttgcggataatcgcccgcttgcgcgccatcgcctgtacgccgagcgacaggataatcgagataatcgccggcaggccttccggcaccgccgctaccgcgaggcttatcagcgacagcagcagctcgcccagcgggatatcgcgcaacgcgaggctgaagaagaacagcgccaccatcatcgcgaggatgatgacaaaaatcgctttccccagtttatccatctgcaccagcagcggagtacggtgcttttcaatagccgccatcatctgattgatgtggcctagctcggtctcttgaccggtagcggtaaccacaccgacgccactgccggcgctgatagtggtgccggagaagaccatattggtgcggtcacccagcggtagctcgccctgcaacgccacagtggttttatccaccaccgttgattcgccggtgagaatcgcctcttcgacccgtagattgtggctttcaatcaggcgcatatccgccgggacgcgatcgccagcgcgcaaaataacaatatcgcccggcaccaggtcacgggtgggaatcgtttcatgcttgccgttgcgctgtacgcgggcatcgctggagagcatgttgcggatccctgcagcgatttttcggcattgctctcctgaatatgaccgatcaacgcattaatgacggtaacgccgagaataaccagggtatcgacccagtggcccatcaccgcggtgagcgcggcagcggccagcaggacgtaaatcaggacgtcgttgaagtgggcgagaaaacgcagccaggccggtttacctttcttttccggcagcgcgttagggccgtatgatttcaggcgcccgacggcttcagcggtgctgagaccgtcggcatggctctttttttgcgccagtaccacctcgactgtttgctgataagcctgctgcggcgcgctgtcgcccgaaggcgtgatgttgtgggaattaatcatccgggtcaaaattaagtttccttttaaattccgtgaatcggaaagcctgaaatcatttctggccaatgaattaatgcgttttgcgagcaagatcaaattatccagtcagaatatttatttgctcgcaaattaaaaaatacatggtaagttggttctgaaaaacaaatattacagaatatttctaaaccatttataaacgaggtgaaacatgtttggaatctaccgcggacgccgcctggcgctgtatgtcgcactggcaatcattatcgccacgattgtgggatatagtacttatagttttgtaaaaatgctgggataataaatgacgttcatttacatcgcgctgcaattaacttaatcacaaatattactcaataaattaacagaggggttttaattaatagtcttagaaataatatgaatgacgtaaattaataagcggataaagcatattgcgttaacggcctttttaccggacaatatgttttttaactgacgattaacatcataatgaaacacccgctggaaacgctgttatccgccgccggcattttgctgttagccctgatttcgtgtctgttgctgccggcgccctcgctcggcctgacgctggcgcaaaaactggtcacatccttccacctgatggatctcaaccaactctataccttgatcttctgcctgtggttcttagcgctgggggtagttgagtacgtggtattgcgctgggtatggcgccgctggttctcgctggcagattaagccatacgagagcaaaaaaagcccgccgaagaggcggactggtatacgaccggcgctcagtgcgcgcggctgtggttctctttacgatacgcgccaggcggctgattgaaagtacgggtaaagatgcgggtgaaggtttgctgcgaatcaaagccgtatttcaggcagatatcataaacccgctggtcggtatctcgcaggtcgcgcgccgccagcagcagtttacgctcgcgaatgtagcgcccgagactttcccctttgtactgtaaaaacagccgttgcagatgccatttcgaatacccggcatggcgcgcaatatcatcaattcgcagcggttgatgcagattgtcatcaatccattccacgatagtgtcaatcacctgagcggatatattcatatctcttctctccttctgaaccactctggcggttagcgccaccaggcgttaaatgattgtgtcttatcagcgacccacaccggttcgcccagcattggcgtgactaaacgccactcacgtccttcgctggctgccgccagccgctggtacggatcgtcccagctgtgttttgccagcacaaagcgtccggcatgccccggtaataccgaccgggcgcgtaaatcatcggcggcctgcgccgtttcttccggcatcatgtggatgtacttccagtcctggtcatattgaccgttttccatgattgccaggtctatagggccaaactgctcgccaatagccttaaaatgcgggccatagccgctatcgccgctgtaataaatcttttcctgcggggtgacgaacaggaagctggcccacaaggtctggttgcgtttcaggccacggccggagaaatggcgagctggcagcgcatgcacggtgagttcatcgctgatttttatcgtctggttccagtccacttcatcaataatcgccgcatccattccccagtagcgcaaatgcgagccgacgccgagcggcgtcaccacgcgtttaactttcggcatcagcgccttaatggtggcgtagtcgagatggtcgtagtgatcgtgggagataatcagcagatcgatctccggcatccgctgcgcgttccacgggtagtcgccggggaaggccttattgatgaaagagaacggcgcggcgtaatcgctaaataccggatcgatcaggatgcgtttacccgccagctgcagataccacgatgagtgaccgagccacaccatcacgtcttcgccagaaggtagaccggcaagatcggtattcaccagcggcaacgcctgctgcgggcgcgcgttttctcgcttcgtgaccaggaaatcccaccacgcggccagcatgtttttctggccggtgaatcccggcgtcggcagttggttatggaactggccgtcacggtagttcggcgactgttcgacaagactgagctgcgcaccctgcggcgctttgccaaaaccggcattaagaacaaacggcaatgtcgttgctgctgctaataacataatggcgaccacgctaaaggtgacacggttcatatcctgaccagacgaaagccccatccaggagactttatgatataacttgattatgagtgagtaagcactcattattaggaaggagtagaaaatcgtcaagactattttcaatttttgacatctgccgttgcagttgtgcggtccgccgtgattagatcgaggtttaactttcagcgaggtaaaatgtagtggctcgtcctaagagtgaagataaaaaacaagcgttactggaagccgccacggccgctttcgcccagtctggcattgccgcttcaacatcggcgatagcccgcagcgcgggggttgccgagggaacgctgtttcgctatttcgccactaaagatgagttgctcaacgagttatacctcgccattaagatgcgcttagtacagacgatgatcgacgggctcaatcctgacgaaaaacgcccgaaagaaaacgcgcgcaacatctggaacagctatatcgactggggaatgcgtaaccctatggaataccgcgccattcgccgtatggcgctgagcgaacgcatcaccgatgaaacgcgcatccaggtcaaagagagttttcccgagcttaacgaaatgtgccaactgtcggtgaaagcggttttccttagcgacgcctatcgcgctttcggcgatgccctgttcctgtcgctggcagaaaccaccatcgagttcgccagccacgatccgcagcgcgctcgcgagatcattgccctcggttttgaggccatgtggaatgcgctgcatgagaatgagtcgtaatggataacgaagcgctacaccatcacgcgcagcgtatcgcgctaacctaccctttcaccgaacactgctggccgtttggcccggagtatgacgtgtttaaagtcggcgggcgtattttcatgttgaccatgacccttcgcgggcgagccatagtcaacctgaaggccgatccgcaaaaatcgctgctgaatcagcaaatttaccgcagtatcgagccgggttatcacatgaacaaaaagcactggatcgccgtggtgccgggcgaggatatcagcgaggatttacttgccgagcttattgacgactcgtggaatctggtggtggataagctggcaaaaaaagaccagcgccggctgcgtcccggctgattttcaaataaatgcgataagtgttatcgcatttttcactcttatcatttcccgcgcatcgctgtactcttcatcccacgaaatgtgcccgtaaggggctgaaaattgtgaggaagagtcatggatattatctcagttgccttaaaacgttactccactaaggcttttgatccggcgaaaaaactgacggctgaacaggcggaaaacctgaaaacgctgctgcaatatagcccgtcgagcaccaactctcagccgtggcactttatcgtcgccagcagcgatgaagggaaagcccgcgtcgcgaaagcagccagcggcacctacgtgttcaacgaacgtaaaatcctcgacgcttcccacgttgtcgtgttctgcgcgaaaaccgcgatggacgatgcgtggctggaaagagtcgttgatcaggaagatgccgatggccgttttgccactccggaagccaaagccggtaaccacaaaggccgcaccttctttgccgatatgcaccgcaaagagctgaaagatgacgatcagtggatggcgaaacaggtttatcttaacgtgggaaacttcctgctcggcgtggcggcaatgggtctggatgcggtgccgatcgaaggcgtcgatttcgccatcctcgacgaagagtttggcctgaaagcgcaaggttataccagcgtggtcgtggtgccggtcggtcatcacagcgtggaagacttcaacgccgcgctgccgaaatcccgcctgccgcagtccaccaccatcaccgagatctaatctccgcgcgctgtcctccccggatggcggcgctttgcgccttatccgggctacggtccagtactcggttggtagccccggttagcgttagcgccaccggggagggttactttttctccccctctccggcgtgccagatccgctcggcgtagcggccaatcatcgccagcgatgccgccaggatcaggaagaacaccaccttgtgcaggctataccagaagaattcgaagaagcgggtgtagaggttgatggcgagaaacgtcaggccaaatccacgcagcatgccatcgtcggttttcaggctgatataaatacagatcaccgccgccagcgcaaacagcagcccccacggcagcagctgcgcctggctcacctcataccagctttcggaatcgtagttgccgaaaatcgacaggatccacagcgcgacaaacaaccaggtcagccccatcgccttactgacggtaaacaactgccgctggcgtaacacgttttgcatcaagtagcacagcgccagcagcacaccgccgaacaacacgaaacgaatcggaaagctcatccccagccagtaggcgccccagcctgatacatagccggtttccgcgccaaaccagttacctaacgccagcagaaagaacagccacaccagcccggagcgggcgaaataccctatcaggccgtaaatcgcgcagccgagcagtatcagcggcgccacgtggccgctgccgtcgtccagccgatcgcctagctgccacagggcaatggcggtgcaaatcacgccgaggaacaaaatcgcctcggtgctgtagtgccactgggattcgcgccgctggcggcggaacccccaatagtaaaatgcgatggccagcagcgtcggcaggataatgcgcgcgacagcggagtcgctgaacagattgataatcgccgcgaccagttcggcgtcggcgaacagactccccagcgcaatcaagacgcaggctatcgcggtccagaaggcatagcggctcaggcgctgccagtcgaaagtacggacagatagcgacgctgacagccgttggccgtcgctgctgttcaggacgccctcctgctgccattgctcaatagcgcgttgaagaatccgctgctgcttgcgggtgacgttcataagcgttccttgtccattgcgggcttagccctgttgatccagccaggccagcgcctgttctccggtttcatccagcggtaaatagaccagcagacgcgaaccgttgcgcggcgcggaataccagtacatttgctgcaggctaaagcgtccgagctgcggatggttaaaatttttcacctggttttcgacgccgcgcacctcgtagcgctggtgccatagcgcttcgaactccgctgaggcggcgaaaaaacgcgccagcttatcttcccactctggcgaaccacgatgctcagccatcgccgcgcgaaaataggaaacaaaagtcggcagcacatcgcgattttcaatgcggctacgccaggcttcgcaggtgagatagagatagatgcaattgcggtcttcttcggcaattgtcgcgaaatcaacgcccatcaggcggcaaaagctgtcattccaggcgacgatatcaaagttcggtttctgaatgctggcgggctgcggcatcaggctatcaagcatgcgtcgggttccggggcttatccctcgcagacggtggcctgcgtattctccggcggcgttaagcctgccagaacgaacagatggcgggtttccagtgggctgcactgaagggcgctggccacgccgcttaataccgccgccgacggattcacttctcgcccctgctcaagccaggtgtaccaggtcacgccgacgtccgccagcatcgccacctcttcccggcgcagccccggcgtccgccgccgcccgacgcgtggcaggccgaggcgctgcgggtcaagactctcgcggcgggcgcgcagaaatgctcccagctgtttacggctatcatcgggcgcgagattcagcgcctcacgttgcagcattagcgtcattatacctccagcatggtagtaccaataccagtatagacaggaactggtacccgtttaattaatcggtgatgctacggccatccgctgaatgacgcaatggagagatccgatgaattcgtctgctgtttcacccggccgcaccggcttactgctgttactgaccggccagatgctgccgttaattgatacctcgataaccaacgtagcgctggactcgatcacccactccctcgacgccagcgccacccaactggagcttattgtcgcgctgtacggcgtggcctttgccgtctgcctggcaatgggcagcaaactgggcgataactatgggcgccgccgcctgtttctgtggggtgtggcggtattcggcatcgcctcactgctatgcggaatggctaactccattaacgccctactcgccgcacgaacgctgcaaggtgccggcgcggcgctgatcgtgccgcaaatcctcgccaccctgcacgtcaccctgaaaggcaccgctcacgcccgggcgatcagcctgtacggcggtatcggcggcatcgcgtttatcgtcggacagatgggcggcggctggctggtctccgccgatatcgccgggctcggctggcgtaacgccttctttatcaacgtgccaatctgcctgctggtgctcgcttttagccatcgctatgtgccggaaacccgccgcgaaagccattccagcatcgactggcagggcactttcagcctggcgttaatcctctgctgcctgctgttcccgatggcgttggggccggagctacactggccatgggagctacaactgcttttgctggccgtactcccctgctcgcctggatgcgcctgagcgcgctgcgtaagcagcagcgcggcgagcaaccgctgctaccgccgcggctgttgaaactcaccagcatccgttttggtatggctatcgcactgctgtttttcagcgcctggtccggctttatgttttgtatggcgctgaccatgcaggccgggctggggatggcgccgtggcagtccggcaacagttttatcgctctcggggtggcctattttatctccgcgctgtacgcgccaaagcttatcgctcgctacagcatgggacggattttgctgatcggtctggcggtgcagattagcggcctgctgctgctgagtgtcaccgtttatcaacttggcctgcggaccacgacgctggcgctggtgccctccaccgcgctgatcggctatggtcaggcgttaatcgtcaacagtttctatcgtatcggaatgcgggacattcgcgcctgcgacgccggagccggtagcgccatccttagtaccctgcagcaggcaacgctggggttgggaccagccattctcggctcactgttcttaaccctggcccagcgtggcggtggtgactatacgcaggcgctgatcgtcttcctgctggtcgaggtggcaatgatgctgctgctgggcgctattgccctctggctgcgccgtcacctgaacctgcagccggtggccacggcgtcctgattcacaactgtgtaacctctgatttgcataatagtcatccagcggtcatcataaccgctggatgtacaggagacgttatgcaggaattaatatcgcaaatcgccgcattaggcatcaaaatcacccctactacctcgctcatcattacttttggcattatttttctgacggcgattgtcgttcatctcattctgcacaaagtggtactgcgcaccttcgaaaagcgggcgcaggccagcagccatttatggctgcagatcatcacgcaaaataaactctttcaccgcctggcatttaccctgcaggggattatcatcaacgttcaggccgtgctctggctgcagaaaggcagcgaagcggcggaaattttatccacgtgcgcgcagctgtgggtaatggtttacgccatgctctccttcttctcgctgctggacgtgattttcaacctggcgcaaaaattccccaccgcctcacagctgccacttaaaggtatcttccagggaattaagctggtcacggcgattattattggcatcctgatcatatcgctactgattggccagtcgccggcgattctgattagcggtcttggcgcgatggccgccgtgctgatgttagtatttaaagacccgattcttggcctggtggccgggatccagctttccgccaacgacatgctcaaactcggcgactggctggagatgccgaaatatggcgccgatggcgcggttattgatatcggcctgaccacggtaaaagtgcgcaactgggataacactatcaccacgatccccacctggtcgctggtctcggattcgtttaaaaactggagcgggatgtctgcctctggcggtcgtcgcattaagcgcagcctgaacatcgataccaccagcatccattttcttgacgagcaagagcagcagcgcctgattaaggccaaattgctgaagccctatatggactcgcgccatcaggaaattaacgagtggaaccaacagcacgctaatgaaccgtcggtgcttaacctgcgcaaaatgaccaatatcggcaccttccgcgcctatctgcaggagtatctgcgtaaccacccgcggctacgtaaggatatgaccatgatggtgcgccagctggcgccggacgctaacggcctgccgattgagatctactgcttcaccaataccgtggtgtgggcggagtatgaaggcattcaggcggacatcttcgaccatatctttgcggtggttgatgagttcggcctgcgtattcaccagacgccaaccggcaacgacattcgttcactgtcgggcgcgctgtcgtcctgattcccggctggcgcgcattgcgcgccagcgtactctcactccactatcatttctcagggctagccgtcgacacagtttaagcagatgatcttttcaccaacatggattatcgccaaaggacgctctgcataatgaaattaaccacaacgtttgtcgcgcttggctgcgctttagcactcctttccggttgcacctcatcgaagacctcgccagaacgccatgcttatagcttcgtgtctcaccgttcagatttcgtcggcggtaatttcaccgttaaccgtcagcaaaattatcagatgaacctgcctaacttccgcgatatctatgcccgcgggcaagaagatcggaaaaaaggggtgagtgaaagcgatgcgcagcgggttgccgacgccattaagcaacaggcgctggaaggggtgaagtcacaacactccttcaacggtaatgcgagcgatcggtggagcgaaacgatggaagcgaaggatgctcgtctgtttggtaatgagctggctggcgcctatctggacggcttccacgggataaaataagttgtgtcgccccgccagtccgcggggcgataagccttacgccgggcggcgcagcagtttgaaagcggcaaacaggaagacaatccataccggcagcagtatcgccgacagacgcatcccgtcaatggtgcacatcagcaccagaatcaaaccgagaaaggcgatgcagaagtagttgctggctggcgccagtaacgctttgaacttcgattctcggcctttacgacgctgcgcggcgcgaaacttcaggtgcgccatacagatcatgatccagttcagcagcagcgtcgccaccaccagcgccatcagcagccccagcgcttcatgcggcaacagatagttgagcaccaccaccagcgaggtaataacgcctgacagcagtagcgaattcaccggcacgccgcgtttgctgacgcgggcgagaaacttcggcgcattgccctgtaccgacaggccaaacagcatccggctgttggaatagacgccgctgttatagaccgacagcgatgctaccagaatgacgaagttcagcgcggaggccaccacgttgctgtcaagattatggaaaatcatcacaaacgggctgctatcggatttaatctccacccacggatagagcgccagcagcaccaccagcgagccgatgtaaaacagcaggatacggtaaaccacctggttcaccgctttcggtatgctcttttccggattttgcgcttccgcggcggtaatgccgataagctccagcccgccgaaggagaacataatcaccgccagcgacagcaccagaccgtgccagccggtggcgaggaaaccgccatgcttccacaggttatcaaaaccggctttgctgccgccgtggccaccaaacagcatccacaggccgaaggcaatcatgccgataatcgccagcactttaatcagcgcgaaccagaactccgcttcaccatacaggcgtacgttgaccaggttgacggcgttaataatgatgaagaaggttgccgcccagacccaggtgggcacgtcggggagccagtactgcatataaatcccggcggcggtcagttccgccatccccaccagcacgaacatcacccagtagttccagccggacaggaaaccggcgaacggcccccagtatttataggcaaaatgggcaaaggaaccggataccggctcttccaccaccatctcgccaagctggcgcataatcaaaaaagcgacaataccggccactgcgtaacccagtaataccgccgggccagccatttgaatcgccggaccaatgccaagaaacagcccggtgccaatcgcgccaccaagggcgataagttgaatatgtcggttctgtaaaccgcgatgaagcgtcgggccgctctcttctacggtatccgacgacgttgacgcgtctttcacgtcgttcccctgtgtgtttttgtgaaggggcaccttttatcacttaggggggattgtcgcaagttgcgcggggcgagcgtttgccgcccgccccgcttttttagcgttagaagtcgtagctcatcgagacgcgaacggtacgcggatcgccttcgaacagataggtaccggtatcgtcaatgccggaccagtacttctcattggtcacgttgctcaccccaacgcgccaggtcatttcgttctggtcggcgttcagacgcatacgatagcgcaggcctaaatccagggtggtgtagctatccagcttcttggtgttggccgcatcggcatactgcgagccgctatgattgacacgcgctgtcgcggtcaggccttccaccggcttaatatcatactcggcgccgaacaccgcgtagaaattagccactccgatggcatctttaccgtcggttgcgcctttagcggttttagtctgtttggcatccagccacaccgtactggcgttaagacgcaaccccagcatcggctcgccaaagacgttcatctctacgccgcggttacgctgctcgccgtcgaggccgtaattgtcagtggtatcggaaatggcgttcggttttttgatttcaaacagggccagcgatccgccgatcgtaccgtaatctatcttgacgcccacttcgtcctgcttcgagtgcgcgatcccggtactctgcccggcattggccgctgtagtcggcgccacagagcccggctgcagcgcttcggtatggttagcatacagcgacagctgctcccacggcttgtacaccaggccaaacgtcggcatccagcggctttgggtataacgcgaagaggtatcttccagtccggtggtgttgctgtagttgcgcacgaccactttctgatgacgagccgccgcggtaaacagcaccttatcgttaaagaagccgagagtgtcgctcagcagccagccctgcgtacggctgcgcgaggtgaccagcggatcgtggtagttgccgccaaaataggcgttatccggcattgccacatcgcggttatcatagatattggtggtcggattcttcgccgacatccgccaggcggtcgcgtcggtatgcacctgcgccgcatagccgagattcaccttatgcgaaatcgcgccggtattgaaatcgccgcgtaccccgcccataccgctgattgcgtcgatgatgcggttagtatcaaggcggccaaccgttgcatcgccgtttttattgagcagcttcggcgcgctgtaggtgccgatttcatgcgaatgctgaccgccgagggcgctgtatatcgtccagctatcgctcaggtcatattccgccttcgccatgccgaactcgctttcgatatcgctatagccccacttctggctgtagtttttgctgttgtccggcagcgccgggacgaaatccacgccgctgatattgacgcccatcgtaccgccgtggaacgttttcttctgatagccgaaatcaagcgaggagcggaaacggtcgccacggtaatcaagtcccagcgaagccagcgtggtacggcgtttatcgttatcgatagcgccttcaccctcgcgatgcaccaggttgacccgggcgccgaactggttgttatcgccgaaacgacgtcccaggtcgagggtaccgccaacctgcgaatcagaggtatagtctacgccaacacgtgcggtcggcagatcttccgcccgtttcggctcgaggttaatcatcccgccgacgccgctgctggccgcgccgttaagcaggctgttagcccctttgaaaatttcaacgcgctccagcatctgggtgtccatcacctgacgcggcaccacgcccgccagaccgcccatggtcatgtcatcgccatcgagcttaaacccgcggattcgataggtctcggcgaagtttccgtagccctgtacggcctgcacgccagcgtcgttactgacgacatcggcgatggttttcgcctgctgatcctgaatcagtttcgaggtatagccgataacgttaaaaggaacgtccatcgccttttgttcgccaagcatccccagacggccgccgtgggcgatctggccgtcgaggaaagccggaaccaccaggtcgccgccggatttaaaatcgtcgttttcgttagcctcgacgatgatggtctcttcaccagactgcttcgcggcagcagcgtccgcggccatcgccgtttgactggcggcgccaatggctaaggccagtaacgttttacgcagcggaaaggatgaatagtgcgtggtgtgcataatttgccccatggatgaggataaatggatcaaagggcccgtcaccaggccagttatttttattgcccgttcaggtcgatgcgtacgacgcggtccgggcctttagtggagtggtctttattgaagggctgtttgacggtgacaaacagcgtctgaccatcggcggaaagcagcaggctgttgggatttgccggcagcgcccagcttttcttcagcgtgtagcggctggcgtcaaggctgatgaccttgccggcttcacgctgtgaaatataaatttcgtggcgttttccattgaactgcaccgccagcgaatcgccaacgtcgagctgtttaagcagtttgccgctgtggatatccagtaccagggtggttttcgctttcgagttgtcggtgacgaacagacggccggtgtcgctatcttcggccatattaagcagcagcgccggtttgtcgcccagtggtttccagcgctgttcaatgcgttggttacgcgggttaatcaccaaaatttcaccactgccgttggcggcgtacacgcgtccggtttgtgcagagtagtgcaggccggtcatccatttaccggtgtttttaatcctcgttttcagcttcagggtagtggcgtcaaccacccagatttgcgccgggtcggcgaccgcgccaacgtagagggtattattcaacaacagcagctgacgcgccccgtaagggagccctttttcattgcgctcgctgaacagcaggcggttttttaccttgccggtggcggtgtcgatagcgctgatgccgccgtcgagcgaattgctgacgaatagcgttttaccatccgcagagagctgtaaagcgaagtttttcagatcggtatgcgtcaggccgatggtattaagggtttgcggatccaatttgtaaaccgccccaccctgcacatctttaaagccttcggcgctggcgacgtacagcgcatctccctgcgggcttagcgccatctcgtacaccccttccgctagctggcgctgcagcggttgcgccacgttaaccgcaggagagttaacaaccggttgagcaacggcagcggaatggtggctcgcgcagccgcctaacgtcgcgctgatggccagcgccaacgccggaagagtgtatttcattggaacaaccctataaaaaatcaatgacccggtggtcgcgcagcggccgatattgtgtatttcctgcctgctgtctttgcgccaccctacgccttcgctgttccttgtgaacgtctcactgacgcagatcgatccatgtttagcctgcgaacaaaaaagagaatgagaactatacgcattatcacatgtcaaacaagccccggcgggcaaaaaagataatctgctgattttttaacgtggaatggcggattgataggggaagaaaggagccgcgggaatcgatacacgcccggatagcgacgcattacgcttatccgggcgacaggcggcgagccacacccttcttgcgaagggcggcttaacacgcttaatgcaatttcaggcgcgggcgaataatccggttaatcccaccggacaacatcatcaggccggttttaaaataaccgtgcagcgtcacctggtgcatccgatacagcgaatcgtaaaccatccgcgcgatacgaccttccaccatcatcgggccgatcggtagatgccccataatgctgccaaaggtcgtgtagccggagagcgaaaccagcgaaccgcgatcgcgataggagaacgatttcaacttatgccccttcatccgggcgataatgttgtcggcggtgaagagcgccatttggtgcgccgcctggccgcgcggcgggataaatccgccttccggacgcgggcacgccgcacagtcgccgaaagcaaaaatatcagcgtctcgcgtggtttgcagcgtcggggtcaccaccagctgattgatacggttggtctccagcccggcaatatctttcatgaaatccggcgcttttatccccgccgcccagacgattaaactcgcctcgataaactgaccatctttggtatgcaggccgccttcttcaacaccggtgatcatggtattggtcatcacattcacgccaagttgggtcagcttttcgtgcacagcgctggaaatccgttttggcagcgcaggtaaaataccgtcgccggcttctatcaggctgacatttaacgcttcgttggtcagatctttataaccgtagctacgcagttctttcaccgcattatgtaattcggcagataattcaaccccggtagcacccccgccaacaatggcaatattgaccttaccggatgtctgcggatcggcagaatagcgcagaaattggttcagcatttgctgatgaaatacttttgcctgctcagaactgtcgagaaaaatacagtgctctttaacacccggcgtattgaaatcattggaagtactgcccagcgccatcaccagagtgtcccaacataatttacgctccggcaccagcacttcgccctgttcgtcccgcagtgcggcgatggtaatcgttttattctgccgatcgatatctattactgaaccgtgctggaaggaaaagtggtgtttgctggcatgggcgaggaaactcaacgcgtccacaccttcatccagcgaaccggtggcgacttcatgcagcagcggtttccacagatggctctggctgcggtcaacgagagtgatattcgctttctgtcgacgccctaatttgcgtcccagttgggtcgccaactccagcccgccggcaccgccgccgacaataacgatctcttttaatggcgtagtcaaggtgacctcccaaataattaattaaatgttaattaaaaacactctaaataatttttagttaacaataatccaaacaataaaatgccagtcatccattagatgattacggggtgcatattggtaatcgcaaatttaattggcggcaatttttaatcgggatattattgtacaagttttcgggcaatttccttgcacgcatattcgaggtaaacaaaaaggccactaaattattacttagcggccagggaaaggattagataataataactattaagtcttatatttaatgagtggtaattagcggcatgcaggtattcctgtagtttaataacgcatcatcaccgatttaagttcggtataatcatcaataaacgcgctaccaaactcacggccaatacccgatcctttcatgccgccgaacggcactgccgggtcgaggaaggtatgcatgttgacccatacgatcccggcgtcaatggcctgcgaatagcgcagcgcctggcggatattatccgaccagacgctggccgccagtccatacggcgaagcattaattctagccagcgcctcttcttcactgcgatagccaataaagctgcataccgggccgaaggtctcctcgcgcatcagggtgctctcttcgctgcgcaccttaaccgccgtcggctgcaggaaatagccctcgccgggcagcgcttcgccgccgcaaacgatggtatcgccctcttcgcgcgcggtctgaatgagccgcaagactttgtcatactgctggcggttggccagcggccccatcagcgtttgttcatccagcggcgaccccggcgcgaaagcgctgagcttgtctttcagcagcgccagcaccgcatccagtttgccctgcggcagataaaagcgctcagcggcggcgcaaatctgcccctggttgaggtaaccggcttcgataatgccgtttaccatggcctccggcgtcagatcattgaggaacagcgcggcgtttttaccacccagctccagcgtaacccgtttacctgacgcactggccgactgctggactttttcaccggtcgccaccgagccggtgaagctcaccttggcgcaggccggatgcgtgatgagccgttgggcgatttcgccaccggcgccgttgaccacgttaatgacgccatccgggatacccgccgctttcgccagttccgccacccgcagcagcgtcagcggcgtatactcgctcggcttgaggacgatagtgcaaccgcagaccagcgccgccgccaacttccagatggcaatcataatcgagaagttccacggtacgatgccgaccaccacgcccaacggctggcggtgggtaaaggcggtatatttctctccggccatcgacggcagcgagacatccagagtttcaccggtgatttttcccgcccagcctgcgaagtagcgcaaaaacgccaccgactgctccagctcaagcatccgcgccagcatgatggttttaccggagcagagactttccaactgcgccagctcttcgcgatgctctgccagcgtgtccgctagctttagcagcagcgcgccgcgcgccagcgtcggcatctcgcgccactgattaaacgcctggcgggcgctctccatggcgcggtccgcctgatcgacatccgccgccgtgacctcggcgattgactctccggtcgccgggtttatcaccgcgaacggcgcgccgtggcccgcctcccgatgaccggcaataaactgcccgtgcggctggcgtaaaaaggcggtcacttccgccagtaaggttatttcgctcatcgtcagcacccgtttttcagcaaagttagcccatcacagcacggttgctccgcgacgcccatcgttctaaagaacgtcattcttccggacgatattcaacgcccgcgcggcgtgctgtgatgaagacattgagccaggcaagacgacagggtaacgcgatgaatattaaaatcgatgcgctgaactactacggcgcgacgaagaaataccagcttcatttcccggcgctacgggaagatatcgaagccgatgtggtgattatcggcggcggcttctccggcattaacaccgcgctggaactggcggaacaagggatcaccaacgtggtggtgctggaagcgcgccatcttggctatggcggtaccgggcgcaacggcggccaggtgatggccgggatcggtcacgatatcgaagcggtgaaaaaacacgtcggtaaagaggggctggaaacgctgtttaaaatcgccaatctcggcgcaggcatcattcgcgaacgcatccgtaaatacaacatcgacgccgatttcgtccccggctacggctacctggcctataaccagcggcagcttaaaacgctgcgccagtgggaaaaggagtttaaagccgctaccccggatgaagagattgtactgtataccgggaaagaggtacagcaggtggtcggctccgaggtctactgcggcgcgctgaaacatatgggcggcgggcagatccattcactcaatatgctgcttggttcggcgcaggccgcgcattctctggggtaaagattttcgaatcctcaccggtggtggaagtgaattacggcaaacaggtacgagtgcgcaccgcgatgggcagcgttaaagccgccaaactgctgtgggcctgcgacagcttcctcaacaatatggagccggagatctacaacaaaacgctggtcacctactcctatcaggtatcgaccgagccgctctccgatgaactgatcgagcgcatcagcccgctgcgcggcgccttcagcgacattcgcccggtgattaactactaccgcgtcacccgcgaaaaccgcctgctgtttggtagcgccacccgtttcctggagtatacgccgaacgatttcgccgcctggaatcgtacgctgctggcggaggtcttcccgtacctgaaagatgtgaagatcgatttcgcctggggcgggccgatggcctgcagcgccaacctgttcccgcagattggcaccttacgcgaccataacaacgtcttttacgtccaggggtactccggcttcggcgtcaccccctcgcacatcgtgtgcaaaatcctcgccgaagggatcaatggcggttccgaccgctatcgtctgctaagcagcattccccacgcgaccatccacggccgtgacagcctgcgcttgctattagtcaccgccggaaaactgatgcatcaaaccgccggtttctggaaaggccggagttaatcaggagaacgctatgcacgcttttaaacttaaacacccggtacctgaactgcagccgatcggcagcgtaagtctgctcggcgcgacgccgaccgctggcgacccgcaggtagcgggcgcgatgatctacggcgagccgcaggacgcctttacctgcggactgttttcgtccaccgaagggagcttcaccatgacctatccgtttaccgaacacgccaccgtgctggagggcgaagtggagctgaccgtcgccggcggcgagccgcagcgcttcgcgccgggggacagttggtttgtcaagcagggcaccgaagtggagtggaaaatcctcaccccacgtttcgtcaaacactacctggcgaacgtcgagacgcgctaagtcagcgcacggtcaaatcgatggccccgctttccggggccatcttgtttatcagccgccacattcatggcccaggtcacagattcacccgttgctctccaccttccggacgatattcgttgagcaggatgcccgcctaaattatgactatccgggagtggcgctggctattccctgccctcccctacattgtgcagaggttgactatgtttagtaacagactcgccagccatcttgaacgcggcgtcgtcggctttccgacgaccctcgccagctcggttgggctgattatggcaagcccggtgatcctgacggtcaccagcggatttggcatgggcggcgacaccttcgcgctggcggtactgctggcttttattatgatgcaggcgcaggtcactaccttcgctgaagccgcgacgttaatccccaccaccggttcggtgtacgactatatctcctgcggtatgggccgcttcttcgccattaccggcgcgctgtgcgcctatcttatcgtccatatcttcgccggcaccgcggagaccattctcgccggcattatggcgctggtgaacttcgaatcggtcaacgcgcagatggccgcccatcaaaacacctggatggtcggcgtcggtatggtggtcattttcggcctgctgaacgccattggcgtggaaattttcggcaaggttgaagtggtgctcacctttggcatgtggacgacgctgaccattttcgggctgtgcggcatttttatggcgccggtgactcacctttccggctggttcggcacgccgctgaacgttagcgatatctccggcctgttcggctatatcggcatggcgatgttcatgttcgtcggctgcgaactggtgacgccgatggcgccggaaatcaaaaaagcccaccgcaccattccgcgggcgatggcgctgggtctgctgggcgtcgccagctgtatgtttatctacggcgcggcgattaaccgccaggtggaaaacgtggtgatcgatgcggcgaataacgtccatctgctggacacgccgatggctatcccggccttcgccgagcgggtaatgggccacgccggccagtattggctcggggtcggcctgctgctggcgggctgcgccacgattaataccttgatggccgcagtgccgcgtattatttacggtatggcgctggacggtgcgctgccgcgttttcttacctggctgcatccacgcttcaaaacgccggtgatcgcgattgccgtcggcgtggccatcccctgcctgcacgcctggtacctgaacggcgatctggaccgcatcgtgccgctgatcctcgccgcggtctgcgcctggggtgtagcctatctgctggtgacgctgtcggtggtgatgctgcgcattcgccgcccggatctgccgcgcgcctaccgttcaccgtggttcccgctaccgcagattatctccagcgtcgggattatcatcgctatcgtgaatattaccccaccggggatggacagccgcgaggtgctggtgccgttcgggattatgctcggcctgaccgctacctacgcgttgttctggacgctgtgcgtacagcgcgttaatccgttcaagccgctggaggtggaagaggtggtcgagcgcgctatcggcaattacgagaaacagacccgcggggagatgacgcctgatgtcctccgtcccctggtttgaaacgccactaatgaacgcggtgcagcgcgacttagctggctggccgagcgaaaaactgagcgaaagcagcgcgatgctgcggctaaacgacgtcaccgccgtcaccttcagcgtgcgccagaagcggctatttatggccagcattcacagctgcgagtttgtcgtcgaggggccggttacccggcccgctcgcggaaagatccgcgcccaccaatccggctggcttaaacgcctaccaatccgctttatcggcagtaaagagagcgcggaactcgccggctatctcaacggttttcctaatctccagcagaccttaagcgagctggactaccgccgcttttcgttgacctttgacgatagcggctggcgctgctgcattgaaccctgggccgccagcgaagtggtctgtaaaatgccgccgctgcgccgttatctgaagctcgaagcgcagcagcggatgctgctgctcagcgtactggcgatgattaatcaggcggtaagtcagtggatggttgagaagatcaatgattaagaccttattgccatgacatcacgcgccgatcagactctccaaaggaatgccgaactgtgcatgaagccggcgaatcatcgggagcgtcaggttccgcgtgccattgagtatttcatagacgcgattagatttaccaattgctggttccagatcttttacggtaagcccctgctgctccatgcgaaattttatggcttcaatgggggtgggcggctcgatgggatagtgccttttctcatactcttcaatgagcaagcacatcacctcaaaaaaatcgccctctggcgtatcaggtgctggttcattatcaaaaaaaggttcaaccgcgcttaacgcggcttcgtaatcttgttcagtgcggataggcttaatattcattatttacttcctctctatcgtctcagcgtttatcacgtcatattccttatgcgttccgataaacttaacgaacatccatccccgcagataagcaacagctacacttaaccgataatcatttccctttatgttgaataccacccgcttatttttcaatatgcttgcgctgcggtattggtccttaatctcctccggggttttccagtcagcctttattgcctcgtccacccaagcctttagcggttgttccgcgtcgggattctccgcccagaaatccctgagtactttcactgagattatcttcatggacggatattagtcccaattcgggaccaggtaaagaaaaaagtcccgaaacgggacttttgagccacattgcatcttgcccttccccgccatcaccgcggggaagctgaggtgttttatagcaaaccaaactgctgcgccagccgatcgatggcctggcgctggaactgcgcgaatgcggcgcgcggctgctgctgctgaataaattccagcagcggatcctgaacctcggtgcgcactccgctcagcgtttccatcaccgccaggccgcagaacggcacgtaggactcggcgtagccgccttcgtgcaccatcaccagtttcccgccgcacaggcgatccgccgcctgctggacctgttcggtcatcgaccggaagctgtcgctatgtagctgcatccgcgctaatggatccatcgcgttggcgtcatagccgcaggcaataataatcagttccggctcaaaacgcgccagcgcgggaatgacgatagtttccagcgcatagcgccagctgtcgtcgcccgccccggccagcagcggaatattgatgttgtaaccttcgcccgcgccaacgccgcgatcgtcctcgccggaatagcccggcgggaagcagccatcctgatgcaatgagatagtcagcacgtcatcgcgctgcagatagatatgctgcgtaccgttaccgtggtgaacgtcccagtcaataatcactacctttccgagccccagcaacgctttcgcccgttcaacggcaatgggaatattggcgaggaaacaaaaccccatcgactggtccggcaggcagtggtgtccaggcggccgtgacagcgaataggcgttatccagttccccttaagcaccgcctcgacggcggcgcaggccagtccggcggaaagactggcgatttcataactccccggccccagcggtgcctctttgccaagcataccgccgccgttatcgctgattgtcttaaaacgctcaagatagctatcgggatggatccgccgcaggtcttccagactcgccgccgccgcgctgcgtagttccagctgcggcgtcagcccggagacgtccatcaggtttttcatccgccgtttggtctccggcgactcggcatggccgccgccagcgggcggctgcacccaaccaccgaccggcagcgttacagcgtgcaggccggtactgtgccagaaacaacgttcatcaaagaagaaaccggtttttcttttcactctatcctcccgttggctaaacctttcccggcggacgacgccgccgcaatcaaaatcagagacagcagcgcgcaggcgcctgccgccgccagcagcggattggcgctggcgaagtgttgcagtaaggccccgcgagcgccggaccggcggccattccgccgccgatcaccagattgatgctgttcatcaaccggccgttgttatcgagcgcggccacgcgagcgaggataaagggcagcacgaatgtccaggtgaacttaaacagcagcgccgcgatggcgtaacgcaccagcagcggatggcctgtcagtagcaacacgctggcaatcagcagcgcgtatcccaaccacaccgccagccggtccggacgttgggtaccgcgcagcgccgcaccgccggcgccgataatgccgaacaccgtcgccgccgccagcaccagaccgacctgtgtcggactcaaccccgccccgctgccgatggtgccgataaaggtccagaccgcgctgaggctgatatagaaggtgagaaccgcaagcaccgccagcgcctttcgccacgacgccgcagccggctggcgatgggaagccgattgcgcttgaaaacacgacgggaaggcggaaaccagcggcaaacagcagagcatgatggcggcaagaatcagataaacgaccttcaggccaaaggtcacgaacaggccgggcaacaccagcaggccaagcatgcctaacagcagttgccccagaacccagaatgcgtacacccgcgatggattcggcgttcccgccgcgcagctgatgcacaaaatcattagcgtgccgcccgccagggaagcaataaagcgtaccgccagcagcgacgcatactgagttaccaccgccgaagcaaggttagcgagcagaaataccgcgcaggcgacgagtgcgacccgccgccagtcgaggcggttcatccaccaccacgccgggagcgtcgccaggctcatcgcgccgagctccgccgaaaatagccagccgatctgtccgggtttaaggtgccattcgctggccagctgcgccgccaccgccggcgcggtcattaaaatccccggcgcaatggcggcgaaaataacaatcgccgccagcaaacgcagcgacaccaccagcccgtcaggccgggaaagggtattttcagaaagaggtgtactcgacatcgtagggcgtgctccagtcaaaaaagcctctccccggacggttatccagggagtgatacccaaaggcatcaggaaaacgccgtgctgccacggcgcgcgcgggatgcgataatcagattacagatgcagcgtacgctgagcggcaggcatccaggttcgggaaacgagttcagtccggttgacgacttcggtcttggcgaaaatattgcgcaggtgggttttcaccgtcgagagcgagatatccagctggcgggcaatcagcttgttgctggcgccttcacgcaccatgccgacgatttcgcgctctttggccgtcaggatggcagggagttcatcctcttcctgcaggaaatcgcgaatagccagttccaccaaaggcagtaccgcctgggcccgcaaccgttcctcgctggaaaaaggcacgtcgcgcatcagcgagataccggcaacgatccgccgttcgcggcgaataaagatttcggtcatgtcgcgtacgttattcggcaacataaattcatgatagtagtggcggttgcggtcgcagagccgcggcgtcatcgctgccatggtcgtgctctggtggctaaagtgcgccggcaggtgcggatccaacggctggaagctttccagatattgttggtgtgtattatccgaaatattatgcaatatatagttttcaggttttaaacgattatttactcgataaaaaaccgctgaagacagtggaattaactgtgaaatagtctgtaaacaacgggctattatcgcatcattacgactggcttttaataaagcagacatgatatttcccccgtcaaggtggtggtgcgtaacacgcggattaccagagtaagatgaagcatacatttcacatttaagtaacacaatcattaacatgttaacaatgtgatatccattacaaacttttcatcaatacattgttatttaaagcatttaaaaatctccctgctatctgttaacgtagcggcgttaaaacataaacaaaagttattaacattacgcgttattttccggcaaggattaaaaacccttatattggcaggtccgatctcatccttaagaacgatagttttttgcattttttcatttataccctaaaaaggatgtcgataatttaacgccgcggcttaatcaacggattacgcctgacttgctattgcccaaatatgccgcccaggccagcaattaatagaggataagccgatgctgaatatcgccgccttacgccagcagcaaattccgctggccgttgaaccgcgctcatcgctgccgtttcatattctgatgaaaccgattggtcccgcctgcaacctcgcctgccgctactgctactacccgcaggatgaaacgccggtcaggaagatggacgaggcgcggctggagcagtttatccgccgctatattgccgcccagcccgccagcgcgcgggaaatcaactttgtctggcagggcggcgagccgctactggccgggctacgtttttataaaaaagcgctcgccctgcagcggcgctacgcccctgatggcgtaaccatcagcaatagcctgcagaccaacgggacgctgatcaacgacgcctggtgccggctgttccgcgaacatggctttattatcggcgtcagcctcgaaggtagcgaagcgctgcaaaaccaccatcgtcctgataaacgcgggaaggcttcctggccggcggcgctgcgcggtatcgccctgctccaccagcatcaggtggagtttaatctgctggtagtggtgcataacgaaatcgccgcccacgcggcggcgatttatgaccgggtggtcacgcttggcgcgcgctatctgcagtttcagccgctaatgagcgaaggcgcggcgctgcgcgagggttaccagctcagcgccgataactgggggcgttttatggtcggtatctggcgacagtggcagaagcgctgcgatatggggcgggtattcgtcatcaatatcgaacaggcgtgggcgcaatactttacccataccagcaacagctgcgtgcatagcgcccgctgcggcagcaatctggtgatggagtcggatggacagctttatgcctgcgatcatctgatcaacgccgaacatcggctgggtcgccttgacgagcagacgcttgccgccgcagttgacgcttcagttcagctccctttcggccagcaaaaaagcctgcgccgcgaatgtcagacttgctccgtaaaaatggtctgccagggcggctgccccgcgcatctcaacgccgttggcaacaatcggctatgcggcggttattaccgtttctttagtgaaatcctcgcgccagtacgccccttttcccgcgaccttaatggcctgaaagcctggcgggccgcgtttgttggggccgcgcatcccgcgtagccctttgccctgatggttgtcccactatgaacaggagagttagtcgtgaacaaaaaagccatggccgcggcggtcagcatgatcctcgccggcggcgcgcacggcgcgcagaatgagcatccaaacgtcatcgtgattatcgccgatgatatgggttattccgatatcagccccttcggcggtgagatccccacccccaacctacaggccatggcggagcaaagtatccgcatgagccagtattacacctctccgatgtcggccccggcgcgttcgatgctgttgaccggcaacagtaaccagcaggccgggatgggcggcatgtggtggtacgacagcaccattggcaaggagggttacgagctgcggctgaccgaccgcgtcaccaccatggccgagcgctttaaagatgccggctataacacgctgatggccggcaaatggcatctcggttttgttcccggcgccacgccgaaagatcgcggctttaaccactccttcgcctttatgggcggcggcaccagccattttaacgatgcgataccgctcggaaccgtcgaggcgttccacacttactatacccgcgatggcgagcgcgtctccctgccagatgatttttactccagcgaagcttacgcccgccagatgaatagctggattaaagcgacgccgaaggagcagccggtcttcgcctggctggcgttcaccgccctcatgacccgctgcaggcgcccgacgagtggattaagcgctttaaaggccagtatgagcagggttacgccgaggtctaccgccagcgcatcgcccgcctgaaagcgttgggaattattcatgacgataccccgctgccgcatctggagttggataaagagtgggaggcgctaacgccagagcagcagaaatatacggcgaaagtgatgcaggtgtatgcagcgatgatcgccaatatggacgcgcaaatcggcacgctgatggagacgctgaaacaaaccgggcgcgataaaaataccctgctggtatttttaaccgataacggcgccaacccggcacaaggtttttattacgaatctaccccgaattctggaagcagttcgataacagctatgacaacgtgggccgcaaaggatcatttgtctcctacggccccactgggccaacgtcagcaacgccccctacgccaattatcacaaaaccaccagcgcccagggcggcatcaataccgactttatgatctccggtcccggcattacccggcgcggtaaaatcgacgcctcaacgatggcggtgtacgacgtggcgccgacgctatatgaattcgccggcatcgatcccaacaaatcactggcgaagaaacccgtattgccgatgattggcgtcagctttaagcgctatctgaccggcgaagtccagcagccgccgcgcggcaactacggggttgaactgcataatcaggcggcctgggtcgatggcgaatggaagctgcgacgactggtacctcgtggcctcaacgccggcgatgcgccgtggcagctgtttaacctgcatgacgatccgctggagacgcatgacgtcgcggcccaacatgccgatcgggtcaaaacgatgagcgacgcttacgaggcattcgccaaccgtacgatggtcaccaaagcgcagggcaagatgatcgattatgtcggtatcgataacaaaaccgggcgttatctggcggtcgatccggcgaccatgaagccggtgcctgcgccgcaggccattcctgtgagcgagggcaaataaacgaacccggctatcgttcttctggacgatagccggaagtagactcgctttctaaggtaatcctgaacccattactggagagagcgaatggcgagagtcgtggtgattaccggcggtggaagcgggatcggcgccgcctgcgcgcggttgatgagcgcggcgggcgatcgggtgtttattaccggcagacgtgaagcgccgctacagaagattgccggtgaaaccggcgcgacggcgctggtgggcgatgccgccgacggcgacgtctggcgggaacggctgctaccgccgattctcgaccagactcacggtattgatgtactcatctgcagcgccggcggcatgggcaatagcgccgcagccgataccagcgaccaccaatggcgtgaggcgctggacgcgaatttaaacagcgctttcgccagcgtgcgcgcctgcctgccccgcttatcgcctgccgcggcaatgtgctgtttgtcgcctccatcgcctcgctcgccgccgggccgcaggcctgtggctatgtcaccgccaaacacgcgttaattggcctgatgcgctccgtcgcccgcgattacggcccacagggcgtccgcgctaatgcgatttgtcccggctgggtcaccactccgatggcggatgaagagatgatcccactgatgcaggaacacgggctgtcgcttaccgaagcctatcaacgggtgtgccgcgacgttccgctacgccgccccgccagccccgaggagatagcccgggcctgtcagtttctctgctctccgcaggccgccatcatcagcggcgcgacgctggtcgccgatggcggttccagcatcgtcgatgttccaacgctggcgtttacttaacgccctactctactcaggagctcacatgacttcagaagccgtatttatccaggtcggcgcgctggccgatggtttcgccccgcacggcaacctgctggccaccgccagtctgcccgcaggcgaacgctttaccttttataccgacgggagcgagccgcagcagttggttatcgaaaatgaccagacactgctttggaacggcaaacgcgcgccctggcgggcaaccgccctgcgccccgatattctgtttatcgattttcttgacccggagcgcgataacgccagtatcagcgcggtatgcaacctgacgcagcgcaacgccacgctggtatacggccagctaccggacgaagccgccgcgcggctggatgccttcagccgggtagaacaaggactgccgctgaccgccgtcgaggcgcgatttgtcttcgcccgcctggatgcccagccgggaccgctgccggactttaccaccgcgctggtcggcatgcgcaatcagtacacctacagcccgaccgagcgttatgaacacatctatctcaacgataatttttacgcctggcagtgtctggatggcgtggaagaggggctggcggatgtcgatcgctgccattacgtgcaggtggctgaggatctctatttgttcgtctggcgggagaaaatcattcccacgttggggctatcttgatcgatctccagcaaatgcgtaccgatggtaagatcatgggttatcagggcagtgattttggcgccttgagtaatttcccggtcggcgcgagcgcgaagatccttaacgtcacccgccatcaggaataataatgcgtggccgggtggcctgccgttaattattcaccccggtggcgctaccgcttaccggggctacggcactgtgcgatttggtggccggacaaggcgcaacgcgccgcctccggggagagcgactgactcaggcgctggcgctgtcgagccgcgccagttgttcgctgctgaggctcagcgccgccgcgtgggcgaagctttccacctgcgccaggctggtggcgctggcaatcggcgcggtaacgccttcccggctcatcagccatgccaacgccacttcggcaggcttcgcgtgctgttcttccgccaccgcgaccagcgtgtcaataatccgcattccgcgtggattgagatatttagcgatgccgctaccgcgctggctttgcgctaaatcggacggctggcgatacttgccgctcaggaagccggaagccaggctgtagtaggtcaccacgcctatatcgcggctgacgcagagatcgcgtagcgccccttcaaaggcggagcggtgatagaggttatattccggctgcagcacctgccaggcaggaaggccgcctttacgcgccacttccagcgccgatgacagctgtccggcatcaagatttgaagcgccaatcgcccgcaccttgccggcctgctgcagcgcctggaatgcttctaacgtttcatcgattggcgtttcaggatccggccaatgggcgaaatagaggtcgacgtaatctgtattcaggcggcgcagcgagtcgtcaatcgcctgctgaatccaggcctttttcaatcctttatggccaggtagccccatatcagagccgactttggtgaagattttgactttatcgcgtatgccggggcgcgcctgcagccagcggccaataatggtttcggattcgccgccctgattgccctccgcccagcgggaatacacatccgccgtatcaatagcatcaaaaccgtggtcaacaaaagcatcaagaatggcaaaactggttttctcatcaatggtccagccaaagacgttgccgccaaatactaatggggcgatggaaaatccgcttttgcccaatggacgtgtcatcataccgattactccttagcttatattctgtttccctcagataaccgcagggggtctaagaggatgtcgagtggataatcagaaaaggaatcttgcggcgggcagtccatgcccgcagggtacacactgacattatgtcccggaataaacgtcaaagctaaaatatttcccggccagttttttgtaggtgccgtcggcaagcattttcgcaatcgcgccatttatctcttcgcgcaacgcatcgtcgccttgacgcaggccaatcgccgccccggcgccgaacagtttattatcctgcagctgtccgccaacaaaggcgaaatccttgccctgcggctgctgcaggaagctgtaatcggccatcatgccggagagcaccgcaccatcgaggcggcctgattcaaggtcgcgaacgacgctatcggcgccctgataggcgacaatgttaatcccctgcggccgccagtactggttcacataagtttcctgtgccgaccctgttcgacgccgatggttttccccttcagctgctctggcgtattacctttgagggtatttttgcgcgccaccagaaacaccggcccgttgtacagcttatcgctaaaagcaatctgctctttacgtttttcggtcatatacatccctgagaggatcgcgtcgaatttacgcgccttcagcgccgggatgatgccgtcgaagttgctttccacccacacgcacttcgcctgcagttgctgacatatcgcgttgcccaaatcgatatcaaatcccgccagcttgccctgcggatctttccattcaaacggcgcaaaggttggatcaacgccaaaacggatctctttcgccccggcggccagcgccgacgtcgacgccattaataccaaacataacaacagtgattttttcattcgaagtcttctccagggattaacggcagtgcgcttgtactaaacgcgcgaacagcgtcgcgccggtgctgataatgtcatcgttaaagtcataaccggggttatgcaccatgcagccgcccttctcgcctttttcaccattgccgagcaggaagtagcagcccggacgctcgcgcagcataaaagcgaaatcttcgctagcgttcattggcgataccgactccagcaccccttcgcggccaaagacttccagcgccagcgcctgggcgaaatcggtctcttcattactgttggttaataccggataggagtcgtaaatctcgacttcgctgctggcgccatagcttttggcggtaaattcggtcagctcttgaatacgcttgatcagcaggtcgcgaatttccggtttcatcgcccgcacgctgagctccattaccacgctttcaggaataacgttcgaggcgatgccggcctggaaagtccccacgctgacgaccgccgtttcacccggcggcacgttgcgcgcgacgatgctctgcagcgccatcaccagcgccgcgccggcaacgataggatcgacggtgcgttccggatgcgcgccgtggccgccgtagccggtaatcgtgattttgaccgtgtccgccgaggccataaagttgccggcataaaagcccagcttgccaaccggtagccccggcatattgtgcagaccgaagatgcgttcgcaggggaactgctcaaacaggccatctttaatcatcagatccgcgccgccgatggcttcttccgcgggctggaaaatcagatgcaccgtgccgttaaactggcaggccggcgaggcgatatacttcgccgccgccagtaaaatcgtggtatggccatcatggccgcaggcgtgcatttttccaggtacggtactggcccagggtaaatcggtggtttcataaatcggtaatgcgtccatatcggcgcgcaggccaatagtgcgcggcgagtcgcctttgctcaggctgccgacgacaccggttttaccgaggccacaggtcacctgatagccccattccgtcagcttgccggcaaccagctcgctggtattaaactcttccagacttaattccggattggcatgtaaataatgacggatagaaatcatttcatcttccgtggctttaatttctggaattacacaatcagacatgccgttctccgggaatagattaagaacttaacaagttatcctggctcaaagtttatgcaagtagcatttctaattgctggaacgccatccgtcatatttttaatacagacaaatcacagagtaatagctattcaaactggcgaaatttaaatataaacgtttattttctaggtttcacaccaacacttactctactatcccgctttaattcagttttaaataaaaataaacagccatgaaatatcatttacttttacttgcctgcgcgctgacgctggcaggctgcagcgctgagggcgacaccgccagccagcaacgcgccagcattcaaaagatgcgtaccaacacgctaagtaaactctatagcctgtatccacaagcgcgtagcgatatccagcattcaaagggctacgcggtcttcgccagcaacagcagcaagatattagtctttggattcggcagcggttacggcgtcgttaaaaatagcgccaccggcaaagatacctatatgaaaatggcccagggcggcgctggtattggtatgggcgtgaaacagttgcgtaccgtactggtattccacgataaagacgccttgaatacttttattactaaaggctatatggtcggcgcggatgccaacgcggcagctaaatatgacgacaacggcatcgccccgataggcgcgtcgaccagcggcgtggcgaaagataccgcctcgctgccgtcaaaagtcaacgtttatgaaattaccgagaaaggtttggcggctcaggcaatggtcaacggttataaatactggcctgatgacgagcttaataaacggtgatccactgcggtccatacaagttagcatcaataagccgggtcagacgttagcctgacccggcgcgaatgccatgccacaggtatcatgatttaatgaccgagggcgccgcttaccagtattgaggtaatgattccggtcgccgcggcgatcagcacgtaattgccatcaatataagaccagtgatggccctccggcgggcgcggcaggccacgttcgttccagttactgacgcgataatcatcaccgcgataacgctctggcgccgggtgacctttacggaaatcgttacctctccaggcgaaataatcctgttcatggcgttcctggcgacgatcgtcatgaccgctacgttccgggccgcggtggtcattgttgccctgatggttatcgccaggaccgcccggctggtggcgtccattctggtcaccctgcttcgggccattctgccatacctgctgttgccccggacgatggccctcatttgggccatcggcaaaagcctgagcgctcagcacgcaggataaaataaccgccagagaaataatctttttcatagtacacctcctgatatatctcttttttaccctgcaaatgtggagaaatagtgattagcaaactatccaggactattcctggctaattcaggaggacagcaagcaataatttcagcaagcgccagacgtaaaaaggccgctaacgcgaccttttttgttctcagcgagtcagtattactcagagactttattctttaactcttcagcgccttgcttggttttatcccagcctttctcgctgacttctttggttttatcccaacctttgctggcgccttctttagtggcgttccagcctttctcagtgccttctttggtcttatcccagcccttctcggcgccttctttggttttattccaggttttctgcgtgccttcgcttatctggctgccgacgctatcgcttttcccttcagcagcatgtttggacttgagcttcatctcttcgccctgattctgcgcctggtgcagtttttcttttgccgtgttggcattttcgtgggctgcggccacggtatcatcggttgcatgtgtagtggttgccgcgaataccggagaagcgaccagaatagcggatagtgcaatcattgcttttttcatatttttcctctcttaacgcgtgctttatgttacgagtcacattcagcatggcataagcttctgcgcttggcattaggaaaagttcttaaaactgccttaccgctattccgtcgttttagtgatcgagatagagatagctttcccagcttttcatacggatgaggatctttcttatcagcgacaggtgctcaaaatgctccgaatagacggcggcttcgacatccgcgccctgcggcagctgataatttgccagacgatcgtcggtcacttttaataccaccagcgctcgaccgcgtgccgctaaatcgttggtcgtcagcaatgtcccctgcccctgaaactggctttcgccaatcgccggtagcacttccgcgacctgcgctttaaaaacggttcccggaatggatgggaacagtaattcagcctgttcacccttttgcaaccgctgcagcgcgttctggcggaatgcggcgacgtattcacgtgaattcgcattgtccgttggcacaaacgtcatcaccggcttcagccccaacgcggtggacatggtccccgggcgcaggccgacggtactgacgtagccgtcagacggcgcgcgcaccaccgtgttatcgagcttaaattgcgcctcacgcagctgcgccagcagcgaagcgactttagtgttctcgccgtggaccaccgaattgagatcgttacgcgcctgtgcgaccttcgcccgggcggcgtccaccgccgcctgcgaggctttccagttctggcgacgggtatcgaccatctgatcggaaaaggcccctttatcatgacctgcctggaagcgggcatattcacgctgggcccggtcgcgctcggctaccgctttgcttaaatcagcctgcgcgctggttaaccccgcatccagcgacaacgcctcctggctggccgctttcacctgcgcggtcaggtcgtccaccttcgcctgaaatggagttgggtcgatggtgaagaggatgtcgccttcatgcagcatctgatttggttgcaccggcacgctggtgactcgaccgcgggtttgcgaaacaatcggcaccgtgcgataaacctgcttcccgacttcgctataggggaagttataattcataccgaggattaacatgccaatcagtatcacgccacctaataccgcagtgggaaccgtccatttatttaatggaatacggaatactttaaatatcacgatacacaaggcggcataacacagcagtaataacgtttccattatttaccctcctgattgacggcgctatttttcagacgatttaattccgcctgcatcgcatccagacgctgatgtaaatcgtgctggtcggcgtttaactgttgcattccccagccacggtcttctcgccacagcgtggcccagatccacagcagcggccacagcacgtgcagggtgaacaagctcacccagccggcgtaatgaatcgcatcctggtgcggatgatttcttttttggctatttcatacggaatatcgtggatcacgataattccataaaataaaatcagcaccaccgcaatcaggatggctaaagcaatataatccagggtcataaaataactccagaatgtgtgacgtatttcacattcactttatacaggcgtcagcaagccgggcataattgccctgacaactgaccatattaatcagaatttatccggtatttttcggtcgatagaaataagttgaccttttttcaccgtgatatagccgccttcttttaacgctgctaaaacctgataaacatagctgcgagaaagattggtccgtttaataataaaagcggacaggctttcacgttttccacaatcgatctcgttacggtacagataacgcgatagcatcgactttatggtctgaaaaccggacaggttgccgcgctcgttgtgcgcatcaagcgcaaaaatgcccatgtaggccagaatagtcgtcagctctttcatatactccggcgaagagtaaaagaagatacgctcgaaatcctccacgctgattctggcgaaacggcagcgatcgagacattgatataacagctctaccgccggacaatagtgctcaagcaggcccagcggcatatgctcgatcacaatacccaacaggttgtcagggtcgttgactgcgagggtgatttgcccggacagcagaaagtaaatgaacccatcctgcggatgaaaacgatcgccggcgacacactcgacgttttcgctacaggcgatgacgtgtgggagatgcgcatttaactgcagcttctggtagcacgcatgaatacgaccaaaactgctattcaacttccccgtatccattgccgtactttcccgtatcaccgacgtcatcaaatatatataaggcaaagcgagggaaaagtccacagctggagttttggcgtaaagatatgtgtggcaagactatttcgcttctccacgatgcaataaatcagcatatatcgccgttaaaatcccgccggggcggaattgctttttaatccactgcgtcacctggccggttgccgcgtgctgggtggccagcagcatgccggaatcctggcgcgggttgtggatctggcggatcaccaacagattctccgcaatggcttcatgagccatatagtcgggtaagaagccgatcccttcgccgaggatctgacactgacatttggtattgaagtcgggaaccaggatcgcctcctggccatgcagcagccaaccgacctttttattgatcgtactggcggtgtcctcaaccatgatattgggatacaggcgtaactggctttccgaaataggttctggcataaacgccagcggatgatccggggcaatagcaaacacccagcggatcgcgccgatctcggtataatcgataccgccgccgtcaagtagcgtgtccggcgcgccgatggcaatattcgcctggttattgatgatcgaatcccagacgccgttgtatacctcggtggtgacggtgatctggcaggtgggaaactgttttttcagcacctgcagcaggcgggcggtatggcgcggcgtgtatagcagttgattaatgcagatgcgcacccgcgcttcaataccctgcgagatagtatctatgctgcgctttatcgcgtgaaaatcattaagcagatcggtggccttgcgaaacagataatagccagattccgtcagttcaatgctgcgggtgttgcgggtaaacagcaccacgtccagcccggcttccatccgtttgatggtatagctgatggctgaggtggttaaccccagctcatcggccgccttgctgaagctgccaaaacgcgccgcggtggtgaatgccagcagattttcttcagtaaaaatcgagttcatgcgcccttcccgcctccgctaaaccatacctgagctaaatgtattggttactgtggcgaggggcaatcatttttgaacaatgcttaatacccgtcgcgacttcaggctcgctccttactggtcgcctcgctgagtttgcgcccgctatattctgaaataaagccgacacaattacccgccagaaatcccaacagagtcactgtccagttcaaaccggtggcgaaaaagagcgtcatgccgaggaaaccgccgggaataaacgaggtcagcgtaaagcgcccctgccagacgatgactgccgaaaacggcaccgtggtaatgacgcttgcccagaaccccgacataccgctggctgaagcgagagcgccggcggccagcgccgccagccacgcccacactgccccggaatagttaacgcacaggcttttgacaaagccggattggccaccccctgccgcatagaaactacagaacgcgacgaagccgatggttcccaataattcccaaccgtgctgcagcccgacgtgcgaggaaatgagctgccaagcgcctgcgcaaataccgacggtgatccccgtagcggtgagtccgttcatctctttcccctctgaaaaatagatcgatgacattgctttctgacggcaactatatcgaaagaaaactcgattgcgttgagggatataggcgtaaagaagtaaatattgctctgccgcacagtctgcatcgattattgaaatttattcaataatctaccggattatggcgaataaaatttaagcgggttcttttatctatttctggttgctatgctcaagccatcgagaaagtctcagccgcaacaacaggagcaagatgatggccacggaaaatattattgctgactattttttggctgcagagcagggaaatatcacgaaattaaaagcctgcctggcaagtggcgtcgatattaatgccagtaatcgtcaggggcgaaccgccattaccctcgccagcctgaataaacattatgcttgtgtctcggttcttattgccgctggcgcggatattaataagcaggaccagacctgttttaacccgtttttaattagctgcctgaataacgacgtcgaactactgcgcttaattttgccggcaaatcccgacctcgaacgattaacgcgtttcggtggcgtaggccttaccccggcctgtgaaaaaggccatcttgagatcgtgaaaatattgctgacggaaaccaatattaacgttaaccacaccaatttcgttggctggacaccgctactggaagcgattgtcttaaacgacggcggggcgacgcagcaggagatcgtcaaactgctgctggagcacggcgcgaacccgcatatgaccgataagtacggtaaatcgccgctggaactggcatgggataagggattcagtgaaatcgcccacctgctggtcgccgccggagcctgaggaaggagaatcgccattaacacctccttatggcggtgtgtgcaagcgctaactgcggatgagagctttctctcgcagcgcggcggcggacaggtcgagcaggttttcactcatgcggtgaacctgctcatccccggcaaaccagggcttctgacgctgttgtgtgaaacctctgataatgcgcccaatagctgtaggttagcactcacccactttgacaacctgctccggccaggggaaagcgtccggtttaccgattcagggatttacattggcgataatacatggatagacatccaccgttgtgagcgctggcaaacgccgcaggcagtattaaacgcggcaacatttagccagattgcctggcgacgttggcgcgacattatcgttacgcagttacatgaggatgacacgttatttctctatcgcggcgacaatcccttttatcacgcgatgcgtcatgaactccagcagcgacgggaaacattatttaaagcacttggcgaaaataaaaatatcagcgccgccgtggcgaacatgatcggattaggcattggcctgacgccatcggcggatgattatttgctaggtctaatcgttattttattcataaagggacacccggctaatcaataccgggaagcatttataaccgcgctgcaaagcgcccgacaaaatactacgccgctcagcgcgataacgctggaggcagcgataaaccaacgttatcgcgaaagtatcgccgtgttgattaatctgatggttaatcaaccgacaaccttttctattgaggctattgccgatattaaaaatattggctcaagttccggcagcgacatgctattgggtatggcggatgcctgcgcgctgagccaaacgtatggagggaataatgtcagttaaaatagtggtgaagaagaatacctattttgattccgtctcattaatgtcgatttccacccgcgctaataagctcgatggcgtagagcaggcatttgtggcgatggcgacggaaatgaataaaggggtgctgaataacctgggactgctgacgccggagctggaagcggcgaaaaacggcgacctgatgatcgtcatcaagggcaaagacggcgccgatagtgaacagatactcagtgaaatagaagcgctgttcagcaaaaaggccgaaagcggccagcacgaagcgcgctacgccaccctcgccagcgccaaaaaacatcttccgcaaagtaacctcgcgattatttcggtcaacggtctgtttgccgctcgcgaagcgcgtcaggcgctgcaaaacgatcttaacgtgatgctgttttccgataacgtctctattgacgacgaactggcgctgaaacagctggcccacgaaaaggggttgttgatgatgggaccagactgcggcaccgccattattaacggcgcggcgctgtgcttcggtaacgcggttcgccgtggcaacatcggtattatcggcgcctccggcaccggtagccaggagctgagcgtccgtatccatgatttcggcggcgggatctcgcagctgattggtaccggaggccgcgatctgagtgagaaaatcggcggcctgatgatgctcgacgccattcagatgctggaagccgatccacaaacggaaattatcgtccttgtttctaaaccaccggcgccgatggtggcgaaaaaagtgctcgaacgcgctcgcgcctgccgtaaaccggtggtggcgtgcttcctcagccgcgccgagcccccgccgatgagccaggtctgcagttcgcccgcggcactaaagacgcggcgctgaaggccgtcctgctgagcggtattaaacaggaaaatctcgatgtgcatccgctgaaccaggcgctgattgctgacgttcgcgcgcagctcacgccacagcaaaagtacattcgcggcctgttctgcggcggtaccctgtgcgatgaaaccatgttcgcggtactggaaaaacacgcggatgtttatagcaacattcagccggatccggcttatcgcctgagcgatatcaatcgcagcatcaaacacaccttcctcgatttcggcgatgacgacttcaccaacggtaagccgcacccgatgatcgacccaaccaaccgtatcagccgcctgctgcaagaagcgcgcgatcccgaagtggcggtcatcgtcatggacttcgtgctgggcttcggagcgcatgaagatccggtgggttcgacgatcgcggcgctcaaagaggccaaagccattgccgccgccgatggccgcccattagcgatcctcgcttacgtgttaggcaccgacatcgatacgccgtcgctggagcaacagcgccagatgctgcttgacgctggcgtcattctggccagcagcagtaccaataccggtttgctggcgcgtgaatttatctgcaaaggggagcaagcctgatgagccagtcgctatttaaccagccgttgaacgtgattaacgtcggtatcgccatgttcagcgacgatttgaaaaagcagcacaccgccgtcacccagctcgactggacgccgccgggccagggcaatatgcaggtggtcgaggcgctggatcgcatcgccgactcgccgctgacggataaaatcgccgccgccaaccagcaggcgctggagcgtattattcagtcgcacccggtactcatcggctttgatcaggccattaacgtcgtgccgggcatgacgccaaaaaccattctgcatgccggcccgccggtggaatggcaaaacatgtgcggcgccatgaaaggcgcggtcaccggcgcgctggtctttgaagggctggccaaagatctggatgaagccgccgagcttgccgcctcaggtgaaattaccttctcaccctgtcacgaacacgactgcgtgggttcgatggcgggcgtgacgtcggcgtcgatgttcatgcacatcgtcgagaacaaaacctacggcaatatcgcttataccaacatgagcgagcagatggcgaagatcctgcgcatgggggctaacgataagagcgtgatcgatcgactgaactggatgcgcgacgtgcagggccccatgctgcgcgacgccatgaagatcattggcgaaatcgatctgcgcttaatgctggcgcaggcgctgcacatgggcgatgagtgccataaccgcaacaacgccggtaccaccctgctgattcaggcgctcacgccggggattattcaggccggttatccggtagagcagcaacgcgaagtgttcgaatttgtcgccagcagcgattacttctccgggccgacgtggatggcgatgtgcaaagcggcgatggacgccgcccacggcattgagtacagcaccgtggtcaccaccatggcgcgtaacggcgtcgagttcgggctacgcatcagcggactgccgggacagtggtttaccggcccggcgcagcaggtgataggcccgatgtttgccggttttaaaccggaagactccggcctcgatatcggcgacagcgcgattaccgaaacctatggcatcggcggtttcgccatggcgacggcgccggctatcgtcgcgctggtcggcggaacggtagaagaagcggtcgatttctcgcgccagatgcgtgaaatcacccttggcgaaaacccaaacgtcaccattccgctgctcggctttatggggatcccgaccgcgatcgacatcacccgcgtcggcagcagcggtattttaccggtgatcaacaccgctatcgcccataaagacgccgggatcggcatgatcggcgccgggatcgttcatccaccgttcgcctgtttcgaaaaagcgatcctcagttggtgcgatcgttacgacgtttaacgttgtagcccgggcgaggcgtttgcgcccggcagccctacacctggccgggcgactaccacgaccacacaataataaaaaccacatcaccttctgtagcggaagccggatatgaaagaacttatcgtcgttgccattggcggcaacagcattatcaaagataacgccagccagtcgatcgagcatcaggccgaggcgatcaaagcggtggccagcacggtgctggagatgctggcttcggactataacgtggtgctaacccacggtaatggcccgcaggttgggctggatttacgccgctcggagatagcccatgaacgagaaggtctgccgctgacgccgctggctaactgcgtcgccgatacccagggcggcatcggctacctcattcagcaggcgctgaataaccgcctcgcccagcgcggcgagcaaaaggcggttaccgtcgtcacccaggttgaagtggataaaaacgatcccggctttgcctatccgaccaagcctatcggcgcgttctttagcgaaagccagcgcgatgaactacaacaggcgcatcctgagtggcgctttgtggaagattcgggccgcggctatcgccgggtggtcgcctcgccggagccgaaacgcattgtcgaagcggaagctattaaagcgctgacccgacaaggctttgtggtgatcggcgccggcggcggcgggatcccggtggtgcgtagtccacagggcgactaccagagcgtggatgcggtgattgacaaagatctctcaaccgccctgctggcccgcgaaattgatgctgatattctggtgatcaccaccggggtggagaaagtgtgcgtcaattttggcaaacctggtcagcaggcgttggggcgcgtcggtatcggcgagatgagccgctatatgcaggaagggcatttcccggctggcagcatgctgccaaaaatcgtcgccagcctcgcgttcctgcaacacggcggcaaacgggtgatcatcaccacgccggaatgtctgccagccgcgctacgcggcgaaacgggaacccatattgtgcatgactgacacaaaaggaagaaagaatgaataaagacaatagccgccgtgaatttcttacccaaagcggaaaaatggtcaccgccgctgccctgctggcggcaggcgcgccggcggcgtatgccgcaagcaacccgccatccgcggccacctgcgataataaaggcgcggtcaacgtcgccgataaacattactaccttgataacgtgctgctggaaagcggcttcgaatatgaaaacggcgtggtggttcacacccggaccgagcggcaaacgctggaaataaaagacggcaaaatcatcgccctacgcagcaatctgagtcatccggacgccacgctgccgcgctatgacgcgggcggtaaactgatgctgcctgccatgcgcgacatgcatatccatctggacaaaacgttttacggcggcccgtggcgctcgcttaaccgcccggcgggcaccaccattcaggatatgatcaagcttgagcagaaactgctgccggaactccagccttatacgcaggcgcacgccgagaagcttatcgacctgattcaatccaaaggctccactatcgcccgcagccactgcaatattgagccggtgtccgggctgaagaaccttgagaatctgcaggaagtactggcgcggcgtaagccaggctttgactgcgaaatcgtcgcttttccgcagcacgggctgctgctgtcgaaatcggaatcactggttcgcgaagcgatgcaggccggcgcccactacgtaggtggcctcgacccgactaacgtcgatggcgcgatggagaaatcgctcgataccatgttccagattgcgctcgattacgacaaaggggtggatattcacctgcatgaaaccagcccggcgggcgcggcggcagtgaactatatggtggaaaccgtggagaagacgccggcgctgaaaggcaagctgaccatcagccacgcttttgcgctggcgacgctcaacgagcagcaggtagatgccatcgcgacccgcatggcggcgcagcagatcaccatcgcctccaccgtgccgatcggcactctgcacatgccgctcaaacaactgcgcgaaaaaggcgtcttcgtgatgaccggtaccgatagcgtgattgaccactggtcgccttacggactgggcgacatgctggagaaagccaatctctacgcccagctgtatatccgccccaatgagcagaccctgtcgcgcgcgctggccatcgccaccggcgacgtgctgccgctgaatgacaaaggcgagcgcgtatggccaaaagcgcaggacgacgccagctttgtgctggtcgatgcctcctgctccgccgaagccgtggcgcgaatttcgccgcgcaccgccaccttccataacggtaagatggtctggggcagcgtcggcgcctgataccaccgtaatttaaaaaaccccggcaagccggggttttgtcatttaccaaacacgattacttctgcggacgcatggccgggaacaggataacgtcgcggatggtgtggctgttggtgaacagcatcaccatgcggtcgataccgatacccagaccagcggtcggcggcaggccgtactccagcgcggtgacgtagtcttcgtcatagaacatcgcttcgtcatcgcccgccgctttggcattaacctgatcctggaaacgctgcgcctggtcttcggcatcgttcagctcgctaaagccgttaccaatttcgcggccgccgatgaagaactcgaagcggtcggtgatttccgggttcacgtcgttacgacgggccagcggggaaacttccgccggatattcggtgatgaaggtcggctggataagatgcgcttccgccacttcatcgaagatctccgtgacgatacgtcccagaccccagcttttctctacctgaataccgatagattccgccagcgctttcgccgcgtcaaagttatccagatccgccatgttggtttccggacggtgtttcttgatggcctcgcgcatggtcagtttttcgaacggcttgccgaagtcaaacacctggtcaccatacggcacttcggttttgcccagcaccgtctgcgccagagtgcggaacagcgactcggtcagttcgatcagatctttgtaatccgcatacgccatatacagttccatcatggtgaactctgggttatggcgtacggagatcccttcgttacggaagttacggttgatttcgaaaacgcgttcgaagccgccaactaccagacgtttcagatacagttccggcgcgatacgcaggtacatatccagatccagcgcgttgtgatgggtgatgaacggacgggcggaagcgccgcctgggatcacctgcatcatcggggtttctacttccataaagccgcgggcaaccatgaactgacgcatggtggcgaggatctgcgaacggatacggaacgtatgacgcgactcttcgttggcgatcagatccagataacgctggcgatagcggacttcctgatcctgcagaccgtggaatttatccggcagcgggcgcagggctttggtcagcagacgcagctcggtgcagtgaatggagagttcgccggtttgcgttttgaacagcttgccgcgggcggcgataatgtcgccgagatcccattttttaaactgttcgttgtagatgccttccggcaggtcatcgcgcgcgacgtacagctgaatgcggccgccgacgtcctgaagggtgacgaaagaggctttacccatgatgcggcgggtcatcatacggccagcaacagagacttcaacgttcagggaagcgagttcatcgttatccttcgcatcgaattcagcgtgcaattggtcagaggtatgatcgcgacggaaatcgttcgggaaagcgacgccctgctcacgcagcgcagccaatttttcgcgacgagttttcagttcattattaaggtcaattgcctcatcggcaccttgtgcttgttgttcagacatgttggttcctcataaccctgctttcaaactagcttcgataaattgaaccaggtcaccattcagcgcggcctgtctctggtaacacaccagagaacaatcttaacgactctggattcactacaagctgatctcactcagctatggcttcactaacggtattttttatcgttggcttccgcgcctgccagaatatccacctcctgttcacttggctgttgatttaatgtccccggtcgcgctgcgctggccgggactacaaatcgcggcaaaggcgacaatgacaatcaccgccacgcagccgatagtccattcgcccatctgcgagaagaaatgctgatacgctgcaatcgccgtgtcgctgatttgcgattcggtggtttgctgcgccaccaccccggccagccagttggcgaccgcgccggtggccaacatataaatgccggttaatacgccggtgacgccgggcatgttcagacgggttatctgcgccatcgccaccgggtcaataaacagctcggcaaagcccatcatcgccagcccggcgaccatcatgcccatcgaggcttgaccatcagccgcgccgtggcgagcattcagcgccagcagcataaatccgccgcccattagcagcaggccgaatgcgaatttcagccatacttttaacaccgagcgggtacgcccttccgggcggatcagccacgccaggatcacgccggccgccatcaccgctaccgcgttaaccgactggaacagcgcggttggtacttcaatattgaacagccggcgatcaacaaagtggtcgataaacagactaatcgagctgccgccctgctgcgccagcacccagaacagcgttccggtcaacatcagcagaacgatttgccacagggcgcgacgatgctgcggcgatttgatcatgatccgcgccaccatctgcgcggcgaacaggcagacaatcgccagcagataaccggaccagttgttttctaacagcaaggtgaagaacaccggcgccaggcacagcatcaccaccagccagccccaggtcggcaacacgaatttcaccgcgcacagcgcctgtttatcgacaccccgggtgtcgcggaaatagcggctgccgcttaagaaaatcatcaggccgataaacatgcctatccccgccaacgcaaagccgatatgccagccgtaccactgcgccgccagcccgcaggcaatgggcgcggcgatcgaaccgacgttaccggcggcatacagcaacgagaaaccgccatcgcgacgatggtcgtcagcggcgtacagttcgccgagcaggcagctgatattggatttgaacagaccatagccgcagataatgatcgccagcgccagatagaggctccaggtggaatcagattcgacgcccagcaccacgtggccgagggtcattaacaacgccccggcaatcaccgccgtgcggttaccgagcaggcggtcggcaagccagccgccgagaataggggttacgtaaactaaagatgcgtaggcgctgaacaaactgatggcgtggctatcgtcaaagccaagttggtgggtgagatagaggatgagtaaggcgcgcatgccgtaaaagctgaagtactcccagatctggatcgctacgatgtagtaaatcgcgcgcggctgtgagggtgttttcataggttctccttgcagcgtgaaaaagggaagtggcaaaccacttcccttgagtgcgtctattacttgttgttttcttctttcagcactttaacggtgtaacgaccatccgcctgacgatatgcgccgtggatatcggtttcgaagcccgggtagtgagcgccgatttcgcacagcatctgcaggaattccaggaccgggcggctttcttcggtgatcatctcaccaggcataaccagcggtactcccggaggatacggcaggatcatgttggcgttgacgcggcctaccatctcttcgaggtaaacctcttcagtctgaccgtgcagctctttctggaacgcggcatacggggtcatcaccatagatggcagcacttcgaatgcgcggaacatcaggtccggcaggttgtgatgctcaaccagtttatgaatgttctgcgccaggtcctgaatacgcatgttttcatagaattcaggatcttcacggtacagagacggcagcatgtttttcacccgcaggttcaggtcgaacgcgcgtttgaagtcggtcagcgcacgcagcaggctcagcgctttagtcttatcgataccgatactgaacaggaacagcaggttgtacggaccggttttctcaaccacgatgccgtgttcgtcgagatatttcgccacgatgcttgccggaataccgaaatcatccatggtgccgtctttcttcatccccggagtcagcagcgtgactttgatcgggtcgaggtacatgtgctcgttatcgatgtttttgaaaccgtgccatgcgctatcggagcgcagcggccagcattcagcgccatcgatatgttccggctgccatacatcgaagaaccagccttcagactcgcctttcaggcgtttgatctctttacggaacttgatcgaacgttcgatagaaccgtcgatcaggcgtttaccggcgttaccgcgcatcatcgccgccgcggtttcggtggaagccacgataccgtagtgcggagaagtggtggtgtgcatcatgtaggcttcgttgaaggtttcttcgttaacgtcgccttttacgtggatcatcgaagcctgagagaacgccgccagcagtttatgcgtggactgggtttcgtagatcactttcccttcaacgcgaccgccgctcatcccgcatttgccttcatagatcggcgagaagttggtgtaaggcacccatgcggagtcaaagtggatggatttcacatccagggttttcttgatgaagtcggtgttatacagcagaccatcataggttgagttggtgataaccgcgtgtaccggccaggtcgcattcggcgtctctttcacacgcttggcgatagtcgcgtgctggaactcgctctgcgggataccaccgaggataccgtaagcgttacgggtcggacggaagtagatcggcgtaatgtcgctcatcatcatcaggtgagtcagcgatttgtggcagttacggtcaatcagcacggtgctgccggcaggcgcggagtacataccgacgattttgttagcggtagatgtaccgttagtcaccatgtagctgcgttcagcgttaaacacacgagcgatatactcttccgcttctttgtgcgggccgctgtggtcaagcagtgaacccagttcagaaaccgaaatggagatatcggatttcatggtgttggaaccaaagaaatcatagaagatgctgcctaccgggcttttctggaacgcggtaccgcccatgtggcctggggtacagaaggtatatttgccttcacgtacatatttgaacagcgctttggtcagcggcggcagaatggtatcgatgtattcatcagtgttctgtttgattttgttcgcgatatcttcagcggcgcccagcgcatattcgaagaagcgaacctgcatgcgcagatcgttcaggctaacgtccagcgtggagtaggtgttagcgaaagcgtacagcggcatgtactcgttcattttgctgatttcttcgcacagttcgagattgtatttatcccagtcgaagatcacgccgcacagacgagagttgttttcgataagttttaataagtcgtcacggtcgttcgggtagacaatacggaagtccaggcgttcgagagcacgatgcagttcacggatgggttcttctttgaagtaaacacccatgtgattcatgattgcaataacgttcatagtcaaatctccagatgtagaaagcccctcccgtcttgatgtgacaggtgatggaaggagcctcaggaaaaagggttactgattagtgcgcgttagcggggctgttgttatccgttgcgttgttctgctggcgctggtgcattttgcgaccgtagaacatcaggataatcaggctaacgatgaaggtgccggccagttcgaaggagcttgcgcccatcagcgcgatgaagcagaacacgcaacccagtaccgaacaaatcaggctaacgaagttacgaatgttgatgccttcgaaacgaatcaggtcaacacaggagtagaagtaaggcagcatggtcagcagtaccgcgataccggtcagttcgccgaacaggtcagaagctttaccaccggcggagttcatcagggtaatcagcaccatcagcgcggtcattttcaccgccgccagcagcaggccttttttcgggataccgttgctatcgacttcgccatacactttcgggaagttaccgtcgttggcggcacgtacaccggcctggccaaccagcatcatccacgagcccagagaagtcaggcaagcaaaggcggtgaaagcggaaaccatcggagcagcccagccgccgagaatggtagaggcgctaatcgcgaacggcgcgccggatgcggccatctgagaagcaggatacataccggcgataacctgagtcgcggcgatatagacgataccagccatcgcagtacccagcatggttgccagcggtacggtacgtttcgggtttttcaccatcccggtactcactgcggcggattctacgccaacgaaggcccacaggcagagcaggatacttttaatgaccgcgtggctatcagtggtgctggaggtgttccagttcgcctgataagttgccgcgtcaaaccagtgccagccgacgaccgctgtcatcaccaccggaataagcaccagtaccagaccaatagtggtcagacggcttacccaggtcccgccgagcatattaacgaaagtaaagatccacacgatggcaatacaggcaatacctgctggcaccgggttatttaaaattgggaagaacgtagagagataagagacggcggtaataccgattgccaggttaccaatccagtttgcatgataataaaggacgccggtctggaaaccgaaggccggagaaatttcccctgcgtacgcaattgggccaccctgctgcgggttcttggtcgccagtcgggcataaacataagccaaagacatcgcgccaataatagaaatcacccaaccccaaatggcaataccaccgatgctggcgaggttcgcaggtaatagtgcaataccgctccccatcatattaccggcgactacgccggtacaggcaaatagcccgatctttttggcagaactcatggttgtttttctcctaagtttatttgggaggtacagatcatgatagagaaccatttattgacccgaccaactgccaacaagattactgattcgtacgagataaatcctaaagataaagtgaaataactacaaacatcagacaaatgatattttgacctttttcgattaacatataaacatgacatgttgatatcaaaaaaagataaacatcgactacttacaaagagttagagagacattccggtgttgaaattgtgttaccaggcaggaaaataacgcttatttcaggtaacaatcagagtgctcatgagatacataaatttaacctcatcatactcaaaaccatgagtatgatgagggtttacttattctgaagcgaggaaattgtcgagatacggtactacgcgggtgacggaggtctggaatactccgttttcaatccagtacaaggtgttttcgccagggcgtaaattaaacgccgtcaggtaggcatcggcagcttcgcggttctgtcctttcatctcatagactttaccgagtagcacgtaattcatccacgacatttctaaatcaatgcccgtgttgatagcgctgtacgcttcatctattttccctttgcctaacatatctaccgtttttatctggtagaagatcgccatatctttaatgccgggcatatcacctactttttcaacctcggcatacagcatcgctaattgtttttcatccaacggctgctgcgaatgacgtaatacatccaccagcgctttttcggcgtaagcataaataaagtccggcgattgtttaatgacgtcattaagtatatcgctggctttaccgagtgaatcgacatcacctttcattaatagctgatgggcctgataaagacgggttaatgaagggctttgcgcgggttgatactgtttcagcatcgctttcatgcgatccggccacggctgcattagcgcggttgacagactatccagcaggtcattctgaatggtgagctggttatccatggtaataaagtagcgtttatcgagcatcgtcgagccgtcggcgttatcgaccagttgcaccgacataaagcactgctgggcgcgatagtggcgctgattaacgaattcgatggtcaacgttttacccgaactgctgggctcgttgatgttgtagttggttttatcgtggaccataaaggtcgaaaaagtgttgagcgaggtggttaccaggctgcccaaccctaccgcataggcatgctgcgacgcccagttgttgcatgaactgccgtttaccaggtgaatgtcgatatcgcgcgggtttagcagcaggcgagttttggtttccggcggccgcgattctatcgacgacaaggcgactaatgcgacgcaactgcccaacgccagcaggaacagcgcccacacccaaaaggtggtgatccgtttacgtttttccggcactgccgtcgccgctggcgcagcagatgaaagagaaatagtcggtggcgacgtttcaggaacggtgacaggggccactggcgggacaaccggcgccaactcttcgccctcttccgtacaccaaattaccgggaccgtcagcttgtaaccgcgtttgggcaccgtcgcaatatattccatgctgccgtcatcgccgtctttcagtgacttacgcaactcggaaatactttgggtgacgacatggctggtcaccacgttgcgcgtccagacgtgatcgataagctcgtcccggctaagtacctcgccaggatgttgagcaaagtagaccagaagatcgattaaacgcggttcgagagtaagctgacgtccgttccggctaatttggtttacagaaggagtaacgagccattccccaacgcgaacaacaggttgttgcataaaaaaaccccaggacgaaaagggaaaggcgcgataataccacatttcgcctacctaattatgcgggtggtcaataccccacacgtttggcataagctactccctttatatacaaatcggttaacagtctatgaacatcgttgtcatttaatccaaaatagccagggtctatgctgcgtccatcaagtcgttaaggagacgcataatgttattcgaccactattccttgcaggccctgccgctgaccaaccgtatcgtgatgccgccgatgacgcgttcccgcgccggggccggtgacgtcgctaccgaacagatggcggagtattacgctcaacgcgccagcgccggtttaattatcagcgaaggcacgcagattagccaacagggacagggttatgcctggacgcctggcatctataatgaagcgcagatcgctggctggaaaaaagtcaccgctgcggtacaccaggcgggaggcaaaatttttgcccagctctggcacgtagggcgtgtctcccataccgtactgcagccgggtaatgccgcaccggtttcctcatctgcaattcaggctgaaggggtgaaggtctttgtcgatgtcgaaggccgcggtccggaaaacggcgtcggtgaaatggtgcagcactcgatgccgcgcgccctgactcgcgaagagatcccggctatcatcgaacaatatgcgcaggccgcgcgcaacgctatggccgccggttttgatggcgtagaactacacggtgcgaatggctatctgattaatcagtttattgattctcgagaaaaccagcgcaccgatgagtacggtggttcgttaaccaatcgcctgcgtttcctcaaagaagtcgcgcaggccgttgccgatgcgattgggaaagagaaactgggtatccgcctggcgccgctgaccaccttgatggggtcaaaagacgatacgccggaagccacctatctggcggcggccagcgtcctcaatgatatcggcatcgcctatatccatatcgccgaagccgactgggacgacgcgccggtgatgcccgccgcctttaaagaagcgctgcgccaggtgttccgcggcacaatgatttattcagggaaatacaccgtagcacgtgccgaagaggcgctggctaaaggatgggccgacctgattgggtttggtcgcccgttcatcgccaacccggatctgccctatcgcctgcagcacaacctgccgctgaaccagccaatcagagagcagtttttcggcggtggtcaagaaggctacctcgactaccctactgtcgatgcgaagtaaacgaagcaaatcgcttcacagtccttaaataaaaaacccggcagcgcgatggcatgccgggttaaaaataagactttcgacgtttacgtataattaatcaatgtgattaattatttatacacttccgccgttgcttcaaagttcggcccatgttcacgcgccgcggtaataatataatatttaccgcccttctcatctgccagcttagaaagctggtcatgaaggtcagaaggtgaagagaattgcccgccagacggccccacagaaatactgcccacgtgagtcagtttgaaatgcgaagcttcttctttagtaattaattgcgctgccgaggcgccaaaggcaacagcagaaagagctaaagcgactaatacctttttcatcctacattctccttggattagagccttaattgaggctctttcagtatagacactagattaataagcgcgctatttatcggattattttttaccgtccaccgcgcttagtagcgcgacggtaccccttccggacgggtcttaaaacgacggtgcagccacatgtactgttccggcgccatcaggatacattgctcaataattttgttcatccagctggcggtagtttccggggaatccagcggcggcgtcgcctctggctgcagcgcaatcagctcatacccggcaccattgggctttcgtcgcggaacaaaaggaacgatggtggcttttgacattctcgccagcatccaggtaccggtggtggtcgcagcattatccacattgaaaaagggaacaaatacgctactggcgcgaccataatcatgatccggagcgtaccagaggatctcgccctctttcagcgacttaaccatacctttcaagtttttacgatccagcatcgtcttgttagaacgcagtcgtccccaggtttgcagccagtcgatcagcggattatcatttggccggtaaacgccaatccccggcgtgaacatgccaaacatccgcgcgccgagttccagggtcagaaagtgaatgccaatcagcaaaataccctgcttctgttcctgcagttcaacgacttcattgacgccgctggtctcggtccagcgctcgacgcgatgggttggccagaaccatgccatgccggtttccatcaaccccatgcccaaagattcaaaattcttaaccaacatttcatgacgctgcgccgggctgaggtgaggaaagcagagctcaagattgcgctgcgcaatacgtacccttccgcgcaaaaaatgcatggataaacgccccagaccatgtcccagacgatagatcagcggataaggaagttgtaccaccagccacaataagccaatacccagccatgccggccagtaacgcgggtgtaataatgaaagagagaatttgggtaaatgcgacatctgactattgctcttcaggatccttgatttacatgccagtgggaggcctcagtccgaatttgcggataaggtacccgatccacaacatttagttttttcctattcgtgcggtaatacgcatacaggcgtagagtataacctctacactgccctggtattaaacgaactgtgtaacaaatttattattaatttttggtatagcggtactcaagcttgcgttatttatcttcaacaataaataaatagcctccgaagaaacctccccgaaggctgaatattgttatgaacgaatgaaagccagcagatcggcgttaatcacatccgcatgtgacgtgtgcataccatgcggtaagcccggataaattttcagctcgctattcgctaagagtttatcctgcaaaatggcggcattcttataaggaacgacctggtcgtcgtcaccctgcatcaccagaaccggaaccgtaattgctttcagatcgtcggtctggtcggtttcagagaaggccttaatcccttcataatgggctttcgcgctaccggtcatcccctgacgccaccagttttggatggtaccttgcgaaacttctgcgccatcgcggttaaaaccgtagaacggtccactggcaacatcgagatagaactgcgagcgattggcggcaagcgccttacggaaaccatcaaacacttcgatgggcgtaccgccggggttattatcggttttgaccatcagcggcggtacggaactaattaataccgctttggctaccctaccctgcggctggccatatttagccacatagcgcgcgacctgaccgccgccggttgaatgaccaacatgaacagcgttatgcaaatccagactttccactaccgcggaagcatcagccgcatagtggtccatatcatgaccttcacttacctggtcggaacgcccatgcccgcggcgatcgatagcgatgacgcgaaatccttgagcgaggaaaaacagcatctggttatcccaatcatcagcgcttaacggccagccatggtggaacacaatcggctgagcctctttcggcccccagtctttaaaataaatattaacgccatctttagttgttacgaatgccatatcacgaactcctctattgaaaatatgacaacttctcattaacattcaattggttacattcagcgctgatatgatgttttccctttatttgcgaaaaacctcaatggcaacggtgccacaaagtgtagaagatgatggctcatttagctcacccttcagcaatttaatatcatcgcaggaactaaaatacgccttgtaccgtttagcgttagtgcatattacctattgataaaatacaccttttcgataactttaattttatagataaatatcagccagttatgtccgaaggaaataattaaaatatttatttcttatgcctttgctttactgtaaattcctctcaaatagttttcttcagattattccctgagaaaaaagaataaaccaaatgatccatccgctcatttttaaaccaatgcgtttgcgcctcacttagcttatccgcgccgaatatttgctgttaattgtgagccaggcaacgtcctgagcgatgcccttctgtcagggctgtacaaaccgtagaaaaccgccatactcaggcacaaaacctgtgattttcaaggggtaaaatttgcctgtagcaatcccggatagcaaaacgaataagaaaggaatgactgcgatgcactacaaattggttaagcaactcaaagatgataatacattaagaaaaagctttattgatttagccatcaaaacgttcgatctatcctttgacgcctggtatcagcagggatactggagcgaatcctatatcccttacgctttcgttgataagaataacgttatcgccaatgcctccgcgaatattattgatctggtctggcaaggccaaccccgacgctatattcaaataggtacggtaatgaccaacattgattaccgtaataaagggcttgctggacagttaatacaacatattcttgatgactggcgtgacaaagcggatgcttttttcctgtttgccaactccactaccgtcgacttctatcccaaatttggctttacgcagaccgacgaatatcaatatgtggcgcccgtttcgcctactcccggcgacttccgtaaactggatatggatagcgcacaggatattgccctgcttaagcactactaccagaagtccaacccttttcacagctacgagtggagaataacttcggcctgctgatgttttactgttcggcatttatgaagcattatgtctactactcggagaaaaaccaggccatcgccattgcgatgcaaagcgcccatgagctgatctgctttgatattttttgcgatgccggacaatccatggcgactattatcaatgaactcgcccagccgcaatcgcaacaggcggtgctaggttttacgccgaaggaaacacgcctgggcgagtacgaaaaaatagacggcgacgatatgttgtttatctattcgactaaagagaacatcttccacgacaataaattgatgttcccgctgctggcgcacgcctgatgccaggccgcaggtcatctatttagcctgcggctggtcggtattgtttcttcctggaaaaccaaataaacagtacaattgattgttgtttttttgttaaatccaggagagacgtcacttgcccctttttgacctgcaggatctctacgcctttttagccctcagcgagcacggcagctttcgctacgccgccgaggcgatttgcatttcgcaatcggcgttaagcaggcgaattgaaaagctggaaaccgctttaggggtgagattgtttgaaagaaccactcgccgggtgacgctcacgcaaaccggcagagctttcgccccaaaggcacagcatctgctttccgagttcgaagatgcccttgacggtattagcgaccgcgccgccttcggcaacggaatggtgacggttgcctgtgtcccctcagccgccaacttctttatgccgcaggttatcagccaattccgtctgcgttttcccaaagcgcggatcaaggtcattgataccagcgccggaaatgtttatagcgccgtgcagaatcaccaggcggatttcggcctgagttttctctccgaaatcgcgtccgaggtggtgtttacgccgctggttcatgaacgctacctggcggtttgccgacgagacgatccgttggcgcagcgtaacaacctcagctggcaagagttttttaaccgggattatatctggctcgataagatctccggcaatcgtcacctgctggatggcgccctgaacgacgtagggccacgacgcactgcggtttgtgaaacccgccatgtcacgacgatgttggggatggtggatgccggcctcggtattgcggccatcccggcgatggcgctgccggcctacgcacaccacgccttagtcagtattccgctagtggaaccagaggtgaaaaggcaggtgggactgataaaaaaagcgggcagagcgttacctcctctggccgccgaactcgaaaaagccattaccgatttttaccatcccaccgcataattagccctcttccggtaattcacaggcattagagggtaaaggatccatgcctgtgtgacggatttccgcctgcgccgggactgaagccagatagcaaagcaactgcttcgcctgcgactgcgcggatgaatcggcaactacggcgcccgcgaagcgagtaacgtattgcacttcatccggcagacgacctacaaacgtcacgccgctgaccggcaacagttcgctaacctgctgaaaccctatcgcgtagtcccctttcgccaccagcgaagcaacgggtattttttcgatcatttttgctttggggctcgcctgcgcggcaatatccagttttctgaagagctccttttcaacatagcgcccactggcgctatccgaataggcgatggatttcgcctgcagcaatgtttgtttcaacgcggcgacgctgctgatatccggtaccggggcgccctttggcacgacggcgccaatacgtgagtccgccagttcaatacgcgaccccggcatcactttgccctgcttctgcaaatcatccagggcgtatccgaccataatcaccacatccgccttttgccctgccgccaggcggttcggtatcgcctccgcggattttcccatcgagggaccatgaatgatatgtaaggtattgccgcttttttgctgatagtcgggcgccagtttatccaacgccgcggagaagccgccggaaatcatcaccgtgatctcctgcgcgacggcaacatgcacatagccgcaggtaaataacagtaacgagaaaacccatgatttacgttgcatattcacctcttaacctaaagaattttgcgttttcaacgcctgtcgggaaacgcgttgatagagatacagtgtcgccagtagcgcgcagattgccgcaaaactcatccagtagccgggcgccgccttatccccggtgactttaatgagcgcggtggacatcgctggcgtgaaaccgccaaacagagcggtagccaggctgtaagccagggaaaaaccagcgaccctgaccgacctgggcataatttccgtcagcgcggggatcatcgctccgttgtagatgccgtaaatgaaggagagccacagcagcacggacaacatcatggcgaagtccggcatgcgggcgagcagcgataacgcaggccaactggtgaaaatagccagcagcgtcatgctaatcagcacgggtttacgaccaaatttatcggaaagcatgccgccgataggcagccagatgaaattagagatagccaccagtagcgtgaccagcagactatccgaggcgcttaacaacagcacgtttttgccaaaggttggcgcgtagaccgtaatcaaatagaacgcggtagtggtcatcgccaccattaacatccccgcaatcaccacccgccagtttgccagcagaatcgtcagcgattgtcctaaggtcggatgttccttacgctccgtatactccgcggtttcattcaggttgcggcgtaaaaagaagataaaaggcacgatcaggcagccaatcgcgaacggaattcgccatccccactgatgcagactcgactcactgagcagcatattgagcagatagcccaatgaagcggccaccataatcgagacctgctgactggcggattgccagctggtatagaaccctttacgtcctggcgtcgccatttcagcgaggtaaaccgagacgccgcccagttccgcaccagcagaaaagccctgcaacagtcggccgcacagcaccagcgccggcgcccacaaaccgatagtctgataaccaggcaccagcacaatcaggatggtccccatcgccataatcgacagcgtgccgattaaacctttacgtctgccaaccttgtcaatccaggcgcctaacaccacggcgccaacgggccgcatcaagaacccggcgccgaaaacggcgaaggtcatcattaatgaggcaaattcattttcggaaggaaaaaaagtatgggcgatataggtggcgtaaaaaccgaataaaaagaagtcaaactgctcaagaaaattccctgaggtcacttgcaggatcactttggccctggcgcgaaacactgaagtagcggcagttgcagacatcacactctccctgattaactgaatagttaactctcattaacatttaggtaaccgtaagagtgcgggaagttgcaaaagagaataagcgcattttgcgcatctattgatgcgtctgacacattaataaagcctgcgggtgaagcggcatcaacaatgacggggcgacgggtctcaccctccgcccgcctctaaacactgatagtgtgaactccgctgcatttcccccaaggcaattcgggattgagcgggcgttttaacgtatatcgcgcacggcaacgtgatccatgtcgtcaaagacctggttctcgccgaccatcccccagatgaaggtataagcgcgggtacccacccctgagtgaatcgaccagcttggcgaaatcaccgcctgctcgttatgcatcacaatatgacgggtctcctgcggctgccccatcatgtggaagacgcaggcatcctcatccatgttgaaatagaaatagacctccatccgccgctcatgggtatggcaaggcatggtgttccacaagttgcccggcgccagttcggtcaggcccatgctgagctgacaggtttccagtacatccggcacgaaatatttattgatggtgcggcggttgctggtcaggttgtcacccagcgtcaccggcgcaacatcggcaggggtgactttcttcgtcgggtaagtggtatgcgccggggcgcagttgtagtaaaacttcgccggttttgcgtggtcgacgctggtaaacaccacctctttcgcccccttaccgacgtacagcgcctcacggtggccgatttcataacattggccatcaacggtaatacaacccgggccgccgatattaatcacccctaactcacggcgttcgaggaaataacttaccccaagctgtttaccgacttcgccacccaccgacaccccgcgctgcaccggcataacgccgccaacaataatgcggtcaatatggctgtacaccatggtgtattcatcagccacaaatactcgttcaactaaaaactcattacgcagcccctgggtatccagagttttcgcatgcgcgctgtggatactttgtcttacgtccacgttagcctccaggcagattcttgaatgacaaagccctcctgcggagggcgagaatagattagtgattcgccgatggcgccacgctggcgccaggcgctttcaccacctgcgcattgccaaaacgtttggcgtacagggcggtaataatcggcactaaaatcgcggtgacgatgacgcttgccgcgaccagtgccgtcgccgaagcggccaccggttcaaaggccggattaatctgcgcgatgatcaccgggttcgcgaccgccgcgcccgctgcggaagaggccgcgacgccagctgtcccgttaccgccgccgataaccctgtcagcaataatcaacggaatgccggtaatgatgatgaccgccacgccaagcacaatccccagcagtccggtatccagaatcacgctcaggttgatggtgttgcctagcgcaaagccaaagaacggaatcagcaccggggtggctttgctaaagaaggcgcggaagtcgtggtcgaggttacctaaggcaaagcccaccaggaatggcagcaccgcgccgataaaatggtgaggctcgaaggaagccagaccggcggagccaaggataaccatcgtcatcagcggcccggactccagcgacatcaatacaaacgcgccggactcttctttactgccgtactgattcatcaggctggcgtacaggccaccgttggtcatatccattgccgagacaattgccaacaccgacagtccggcaaagaaaccggtctggacgccgttttccggaatgaccatcgcggcgataaaggccacaatccaggcgacggcaattttggtgatcactaacgtgccggatttacgcaatacggtgccggtggcgcgcaaatcgatcgatgcgccgatacagaaaaaccacaccgccaggatcggtaccgtgccgccaatcatgcctttggtgaatgagccaaagtaattaccggtatccggcgccagggtattaagcatcgcgcccagcagcaatggaaccagcatcataccgcctgggatacgttcaatggttgctttgatcttcattttttatcctcatctccaccccacctgaacggcaaggatgtgacttattctttcaatagcgtttgaaaaaattcttactgttcattgcattacgaacagatgagaaaagtcaggagtctcagggttgtgcgcaccacactgataccatgccgttatcattgatcatgtgaaataatgattcaacgaaaacaaaacagcgttttagttaccgtcatcacatatcaaaaagaaatcgaacgatgggaatttattgaagcgttagcggaggagtagatgcgatgttgcagcgatcggaagcaggatgaaggcggatgaacaaccacaccagcccgagtaacggaaccagcacggcaaattgactcaatttttgaggaagctgtcccaaatatgtctcacaaagaaaaatcagcgattgggagggagttgataattggttgattttaaatggcacgccctacaggattcgaacctgtgacctacggcttagaaggccgttgctctatccagctgagctaagggcgcactgagaagcgggagcttcgggaggtgcaatcgcgtgaaattatacggtcaacctccggtgagtcaatgcattttgcccggaaaagacagcagcatagcgagcttgtcgattattaacgcgatgtctggttaaggattgttcgccccgttcattcgcgactggcccctgtcgtcgccacggcgcggaaaaatagcctgtttcttcctcctcgcggcggaaaaccgataaaaacgcaaacgataactgacagcgaggctggcttctgacaaaatatccacatcccctttcgtaaagtgacagatggaatcctctctctgatggcagcaaaaattattgacggtaaaacgattgcgcagcaggtgcgctctgaggtcgcggaaaaagtgaaggcgcgcgtagcggccggaaaacgcgcccccgggctcgccgttgtgctggtcggcagcaaccctgcgtcgcagatttatgtcggcagcaaacgcaaggcatgtgaagaggtgggcttcgtctcccgctcttacgatctcccggaaaccaccagcgaagccgagctgctggaacttatcgacacgctgaatgccgatagtactatcgacggcatcctggttcagttaccgcttcctgccggcatcgacaatgttaaagtccttgagcgcattgccccggacaaagacgtagacggcttccatccgtataacgttggtcgcctgtgtcagcgcgcgccgcgtctacgcccgtgtacgccacgcggtatcgttaccctgcttgagcgctacaatatcgatacttatggcctcaacgcggtggtgattggcgcctctaacatcgtcggccgtccgatgagcatggagctgctgctggcgggctgcaccaccaccgtcacccaccgttttaccaaaaatctgcgccaccacgttgaaaatgccgatctgctgattgtcgcagtcggtaaaccgggctttattccgggcgaatggattaaagaaggcgccatcgtggtggacgtcggcattaaccgtctggaaagcggcaaagtggtcggcgatgtggtgtttgaagacgcggcggaacgcgcgtcctacattacgccagtcccaggcggcgttggcccgatgaccgtagccacgctgattcagaatacgctgcaggcgtgcgaagagtatcacgacattcaggaggcctaagatggcgaatttttctctgggcaaacacccgcatgttgagctgtgtgacctgctgaagctggaaggttggagtgaaagcggcgcgcaggccaaaatcttcatcgccgaagggctggtgaaagtcgacggcgcggtggaaacccgtaaacgctgtaaaatcgtcgccggacaaacggtgacctttgacggtcaaagcattaccgttatcgcctgatcaaaaacgcccggctaaccgggcgttttttatggtttacttacggcgccaggtagtgccctgcgggccatcttctaacacaatacccatctcgttaagacgatcgcgagccgcatccgccgccgcccagtccttcgctttacgcgcatccagacgttgttgaataagcccttcgatttccgccacttcgccatcatcggcctgcgcgccgctctgcaggaaagcgtccggctcctgctcaagcagacccagcaccgaggagagcttacgcatatgggccgccagcgcgttcgcggctgctgcgtcttccgttttcagacggtttacttcacgtgccatatcgaacagcaccgaataggcttccggcgtgttgaagtcgtcgtccatcgcttcaataaagcgtgcttcaaaggcttcgccgccggcaggctgcacggatttatcggtcccccgcaacgcggtgtacagacgctccagcgccgaacgcgcctgcttgaggttctcttcgctgtagttcaactggctgcgatagtggccggacatcaggaagtagcggatggtttcggcatcgtagtacttcagcacgtcgcggacggtgaagaagttacccagcgatttcgacattttctcgcgatcgaccatcaccattccggagtgcatccagtagttgacgtattcgccgtcgtgggcgcaggtcgattgcgcgatttcgttttcgtgatgcgggaacatcagatccgaaccgccgccgtgaatatcaaagtgattacccagctgtttgcagttcatcgccgagcattcaatgtgccagcccggacgcccttcgccccacggtgacggccagctcggctcgccctctttcgacatcttccacaggacgaagtccattgggttacgcttgacgtcaaccacgtcgacgcgagcgcccgcctgcagctggtcgagatcctggcgcgacagcaaaccgtagttcgggtcggtcggtacgtcgaacatcacgtcgccgttatccgcgacataagcgtgaccgcgggcgatcagctgctcggtgatttcgataatttcggcgatatggtgggtggcgcgcggctcgttgtccgggcgcagaatgttgagggcatcaaaatctttgtgcatttcggcgatcatgcgatcgaccagcgcgacaaagctttcgccattttcattagcgcgcttaatgattttatcgtcgatatcggtaatgttgcgcacgtacttcagcttgtaaccaaggaagcgcaggtagcgagcgacaacgtcgaaggagacgaaagtgcggccatggccgatatgacagagatcgtaaacggtaattccacacacgtacatgccaacttccccggcatgaataggtttaaattcttctttttggcgcgtcagtgtattaaaaatttttaacatcgaagattccgtgtagacgtgtgtggatataagtcgcttattctaaccctaattcaaaccggaagcagcacacattgcaaggtgcatcgacccccgcggttatgctataacagccacctatgtcatacccaaccttgggttcagcactacaatcatcggaacaggatgcaaaaatggttactttccacaccaatcatggcgatatcgtaatcaaaacgtttgacgacaaagcgccggaaacagttaaaaacttcctggactactgccgcgaaggtttctacgacaacaccattttccaccgtgttatcaacggcttcatgattcagggcggcggctttgagccgggcatgaatcagaaagcgaccaaatctccgattcagaacgaagctaacaacggtctgaaaaacacccgtggtaccctggcgatggcccgtactcaggcgccgcactccgccaccgcgcagttcttcatcaacgtggtcgacaacgacttcctgaacttctctggcgaaagcctgcagggttggggctactgcgtctttgccgaagtggttgaaggcatggacgtggtcgacaaaatcaaagcggttgccaccggccgcagcggcatgcaccaggatgtgccgaaagaagatgttgtcatcaaaagcgtcaccgtcagcgaataattcgtggcgacactttttattgcagacctgcatctgcaaacagaagaaccggcgatcaccgccggttttctgcgttttttacaggggaagcccgtcaggctgacgccctgtatatccttggcgatctgttcgaggcgtggatcggcgatgacgatccgaacccgctgcatcagcaaatcgcttcggccatcaaagccgtcgtcgacgctggcgtaccctgctacttcatccacggcaaccgcgattttctcgtcggccagcgctttgcccaccagagcggcatgatcctgctcgccgaagaagagcggctggacctctatggccgtgaagtgttgattatgcatggcgacactttatgtaccgacgaccccggttacctggcgtttcgcgctaaagtccataccccgtggatccaacgtctgtttctcgccctgccgctgtttatccgccgccgcatcgctgccaaaatgcgcgccgatagcaaagccgccaacagcagcaaatcgatggaaattatggatgtgaatccgcaggcggtcgttgacgcgatggagcggcatcaggtgcagtggctgattcacggccatacccatcgcccggccgtccatgaactccaggccaacgggcagcccgcgtggcgcgtggtcctcggcgcgtggcacagcgaagggtcaatggtgaaagtcagcgccgacggcgtcgaactcatctatttcccgttttaatttcgccaacgatttccctgtatttccgccgacgcaaccgttttccttgccgggatatcgtgctattctctgtggcctctaaagcagtgtgaagcacacccacaggagttttcagacgcatgtcttcccgcaataatccggcgcgtatcgccatcgtgatggggtccaaaagcgactgggctaccatgcagttcgccgcagaaatccttgataccctgaacgttccgcaccacgttgaagtggtttccgcccaccgtacgcccgataaactgtttagcttcgccgaaagcgccgaaagcaacggttatcaggtgatcatcgccggtgcgggcggcgcggcgcatttgccgggtatgattgcagcgaaaactctggtgccggtgctcggggtgccggttcaaagcgcagcgttaagcggcgttgacagcctctactctatcgtccaaatgccccgcggcatcccggtcggcacgctggctattggcaaagccggcgccgctaacgccgccctgctcgccgcgcaaattctcgcccagcatgatcccgaactgcaccagcgcctgagcgcctggcgtcaggcgcagaccgatgaggtgctggataacccggacccgcgaggtgcggcatgaaacaggtttgcgtcctcggtaacggacagttaggccgcatgctgcgtcaggccggtgaaccgctgggtatcgccgtctggccggttggcctcgaagccgacccggaagcggtgccagtccagcaaagcgtcatcaccgccgaaatcgaacgctggccggaaaccgccctgacccgcgagctggcacgccatccggctttcgtcaaccgcgacgtttttccgatcatcgctgaccgcctgacccagaaacagttattcgacaaacttggcctcgccaccgcgccgtggcagctactggcggataaaagcgagtggcccgccgtgtttgcccgtctgggcgaactggctatcgtcaagcgccgcgtcggcggctacgatggccgcgggcagtggcgcctacgcgagaacgaaaccgcgcaactgccggatgataattacggcgagtgcatcgtcgagcagggaattaacttctccggcgaagtgtcgctggtcggcgcccgcgggcgcgacggcagtacggtgttttatccgctgactcgcaacctgcaccaggacggcattctgcgcgccagcgttgccttcccgcaggccaatgcgcgccagcaggcgcaggccgaaagcatgctgacggcgatcatgaacgagctcgactacgtgggcgtaatggccatggagtgcttcgtcaccgccgagggactgctgatcaacgaactggcgccgcgcgtgcacaacagcggccactggacacagaacggcgcttccattagccagtttgaactgcatctgcgcgccattaccgatctaccgctgccgccgccggtggtcaacagcccgtcggtgatgatcaacctgatcggcagcgatctgaactacgactggctgaagctaccgctggtgcgcctgcactggtacgacaaagaagttcgtcctgggcgtaaagtcgggcacctgaatctgaccgacagcgataccgatcgcctgagcgccacgctggaagcgctgaaaccgctcctgccagccgaatacgccagcggcgttttctgggcgcagtcgcagcttaattaagccattcgtgccggggatttgatctatccccttccccggcatgcccttcggcgcgtagaatccccacctcgcagtaagcacatcccggttttaactcaaaaggacgacccatggaaaatgggacacactatcgcgccatcctcagcgcggatacgccgcttatcgacgtccgcgcgccggtggaatttcagcaaagcgcgatgcccgcggcgattaacctgccgctgatgaacgatgatgaacgcgccgccgtcggcacctgttacaagcgccaggggccggaagcggcattagccctcggccataagctcgtcgatggcgacctgcgcgccagccgcctgaaggcgtggctgtcggcctgcgcccgctatccacagggctatctgtgctgcgcccgcggcggccagcgctcgcatatcgtgcagcagtggctgcgtgaagcaggcgtcgactatccgctgattgtcggcggctacaaagcgctacgccaggcggcaatacaggctaccgaggagctggtacagcgccctatcgtgctgattggcggctgcactggcaatggcaaaacccagttggtttgctcgcgcccggacggtatcgatcttgaaggtcacgcccaccaccgcggttcgtcatttggccgaacgctgctgcagcaacacccgcaggcgacgttcgaaaaccatctggcgatctccctgcttaaaaaggctgaacaacaaacacgttgggtgatggaagatgaaggccatatgatcggcgccaaccacctgccggagtgcctgcgcatccgcatggcgcaatcgccgctggcggtggtggaagatccgtttgacgttcgtctggagcggttgcgcgaagagtacttcgatcgtatgcatcgcgactttattgccgcctatggcgaagagaaaggctggcaggaatatagcgagtatctgcatcacgggctgtttgccatccggcgtcggctggggctacagcgctttgcccagttaaccgaacggctcgacgcggcgctgttgcagcagcagcgcaccgccagtaccgaggcgcacttcgcctggctggtaccgctgttaaatgaatactacgacccgatgtatcgctatcagttgggaaaaaaagccggaaaaatcatttttcgcggcaactggcaggaggtcgccgcctggctggcgaagtagttcccccgaccagacggcttcccgggtagcggccgacgccttacccggggctactcccgcttagcgcagcgcaagccggggaaattcccggcttgcggcggctcatcgtcagaagtcgtagcgcagacgcaccaggttcatatcgcccagattatcggtgctggaggtaaacacgtgctcgtaatcaacacggaaaccgtaatccagctggaagctaacacccaaaccgttatcaatacgctggtagttgcggccattcacgtactccagacggtcgcccataaagtacggctgaatagatttaacagcgtattgattgatcgggaatttatagcccgcaaagtattcaataccccaggcatcgccggcgaagtagttatgaacatcggttttcttggtggtcaggaagttctgataccagccgccgccgaaggagaaggtccagttatccggagtccagctcagcgcggtaccgacaatattctggtcgtaggttttgctatcggagcttgacgggtcgcgcatttcggcgcgggtgtagttccacgcggtaccccaggtcaggtccttcatgatgtggtaatccacgccgatagacccgccgcctttacgtttatagcgcagaccatcacccggcagatactcgctatcttcaaacagataggatccgtacagatcgacatcaccgacggttttcttatatttcaacatattgcgtgaacgataagaaccatcgtagtcgccgttaataccgttacccggagcctgaccgatcatatcgtagtcccagatatcggttttcacgccgacgacatcatagtaaatactgttttgctgaccgtaggttaatgtcccccaggtatcgctcttcagaccggtgaacaacatacgacgggaggtattgttcgccccttctgcgtagtgattatcccaatcgaacagcgccggaatattcacccccagttcgtagtagctgatccagctaatatcatcaaacagataataatcagccgcaaaacggaaacgggtgccgccatcgaatccattacgcttgtaagaacctttatcgccatcgccggtcatcatgttgaactgcggacgaatactgccgccgacggtaaagttaaggcggcttaacggatcgcccgcctgcggatcttgtttcagcagcgtaatctcagcctgggatgcaaaagaggttaacgctaatgctgcgccgatcgagatcgccagcgcttttattttatgtgccatgctttttccttgagtaataagcaaccttatatttgccagttgaatattaactgcgaattagcacgacgtgttgttggttttttaatgttttgtgcgcttaaaaatcaatgaattatcattttgtgccgttaaaataaaagcgccgcgaaattgcgcggcgcttcataaaaatgaaatctatttactggttaaattgtcggaataacgctttaccttttaataagcgtaatcccaaccatccgccgcacaacgataataatatagcgccggataatggcagcataacccacagccgccagtcaggcgtccatgggaaatcaaacaccttggtttgcagcatcgccagcgccacctcggcgccaatggccgccaccagccccgacaccacgccaagcagggcgaactccgcccacagtgtggtacgcagcaaggtttttccagcccccagcgtccgccagacgaccagctcctgatgccgctgacgcatcccaacctgcacctgggccagcagcagtagtacgccgcagacggtgaccagcaccaccatgacttccaacgcccgacttacctgcgtcaatacctggccgacctggcgcaggatggcgccgatatccagcaggctaacggtggggaactcgcggttaagctgggtcagcatcgcgttgccattatcccagcggaagctggtgagccagctttgcggctgcccatccagcgcccctggcgggaaaataaagaagaagtttggccgcaggctctcccagtcaactttgcgcacgctggtcaccttagcgttaaattgctgggtgtcgccggtaaaggtgacgctatcaccgatcctgacgcccaaccgctgcgccagcccctcttcaatcgacacctcgcccgccttcggcggccagctcccggccaccagcggattatgatccgggcgttgatcactccaggtgagattcagttcgcgattcagcgcttcgtctttattcccttccgtcgtctgaccgttaatctgcgtcagacgcgcgcgcacgatgggataaaactccgccgcccgggtctggtgttcggcaaggaatgtcttcaccggcataacctgttcgggagcgatattaatcaggaagtagttcgggctttccggggcaactgctgctgccagcgttcgagcagatcgccgcgtagcaccaaaagtagcgccagcagcataaacgacagcgaaaacgccgccagttggctcagcgttgaccacggctggcgcaacaggcggttcaccgccaggcgtagcggtaacgctttcagcgttaagcgcttgagcaaccacagcaagatccagcctaccagcccgcacaacagcgccagcaccagcgccccgaccaacaccgaccacagcagtgggctaccgcccatcagccaggccagtccgccgacaaccaccgcgcagaccaccggaatataatgttttagcggccagacgttagccaccacatcttgccgcagtacccgcagcggcagagtcgccagcagcagccgatagggccgccagccgaccagcagtgaaatcaccaccatcgcgccaatagcccacaaccacggccagccgctggcgggcggcagcgcggcgggcagcaccggcttaagcatcaccagcagggctttttccagcagcagccccatcgcgccccccgccgccacggccagcgccagcaacattagccactgaccgacgataagtttacgtagctgcgcccgcccggcacccagcgtcttaaggatggcgaccaaatcgtagcggctgcggcagtaatggcccatcgcgaccgctactgcggcgactgccagcagcaacgttagtaacgcggacagcagtaaaaattgctgcgagcgctccagcgatttgcccagcgcgctgtcgtcctgttcgagaccaatccagcgatgttccgcaccaagcttcggcagcagccaccgctcgtaagccgccagctgctgcgcgctaccggcgaatttatagcgccaggagacgcggctaccgggttgtaccgcgccggttttcgccacgtcggcgatattcatcagcaaccgcggcgccatctggaaggggttgaagccggcgtcaggctcctgaatgacctcgccagcgatgcgcaaggtggcgtcgccaacgtcaatgttatcgccggttttcagattcagtaatgccatcagcctcggcgccagcaggacgctgccgcgctgcggttttaatcccgccggagaggtctccagcgcgccatacagcggataagaatcatcaaccgctttgacatccgccagttgcggggtatctacagcgaaagtcatagtggcgaagctcagctgttcgccgacggttaacccgagcgagcgcgcctgggcgagccactcggcgggcacttcgcgtgaactgcgcagagtgcgatccccggccataaattcgcggctttgctggctcaaccctttttccatacggtcgctgattgagcccagcgccagtacgcaggccaccgccatgcttaatgccagccagacgatgagcagcgaaggcgagcgccattcgcgccagaaccagcgggctatcatgcttcctcctgcaacttgccgtccaccaggcgtaagcgacgatcgcagcgcgccgccagcagcggatcgtgggtcaccagaatcagcgtggtgccgtgttcacggttgagcgagaacagcaggtcagcgattttatcgccggtgtgacggtcgagattgcctgtcggctcatcggcaaatagcaacgccggacggccgttaaaagcgcgagccagcgccactcgctgctgttcgccgccggaaagctgcgccggcaaatgctgcaggcgtttgccaagccccagttgttcgagcagcgcgcgcgcatcgccacggctctggctatcgctggcgccgcgcagcaatgctggcagctcgacgttctccagggcgtttagcgtcggaatcaacataaacgattgaaagacaaagcctacgtgctttgcacgtagcgtcgcgcgcgcctcttcatccatctgatgcagcggctgccccaaaagagacacttcgccgctactgccgtcgtcgagcccggcgagaatcgccagcagcgtagattttccggaaccggactcgccaatcagggcgatggtttgcgccggtttgacaaccagctcaactccggtaaggatggacagctgatgctctccctgaccgacggatttcttaagatgatgaacttcaagtatgttttccgctggcatttgcctttcctgtttatggttctgtttacctgccgcgcgatggcggcagatacgctgttagtgcttggcgatagcctgagcgctggctatcggatggcggcgaatactgcctggcctgctctgctcaacgacaagtggcaggccaaaacgacggtggtcaacgccagtatcagcggcgacacctcgcagcagggactggcgcgtctgccggcgctactaaagcagcaccagccgcgctgggtgctggtggagctgggtggcaacgacgggctgcgcggttttccgccgcagcaaacggagcagacgctacgcaccgttattcaggatatcaaagcggcgaaggcccaaccgctgctgatgcaaatacgcctgcccgccaactatgggcgccgttataatgaagcctttagcgcgatttatccgcaactggccaaagagttcgatattcctctgctgcccttttttatggaggaggtttatctcaagccacaatggatgcaggacgacggcattcatcctaatcgcgatgcgcaaccgtttattgccgactggatggcaacccggttggctcccttagttaatcatgactcctgaacgccgggagtcattcacaggtaaagttatgcaaaaatcggttttagttacaggatgttccagcggaattggcctcgaaagcgcgctcgatttaaagcgtcagggcttccgcgtactggccgcctgccgtaaggcggaggatgtcgcccgtatgcaggagctgggtctgaccggtattttgttggatcttgatgacccgcaaagcgtcgataatgccgcagccgaagtcatcgcgctgaccgagaaccgcctgtatggcctgttcaataatgcaggctacggcgtctacggcccgctaaccaccatcagccgtcagcagatggaacagcagttttccgccaattttttcggcgcccaccagctcaccatgctgctgctgcccgccatgcagccgcacggtgaaggccgcatcgtgatgacctcttcggtgatggggctgatttccagccccggccgcggcgcctatgccgccagtaaatatgcgctggaggcgtggtccgatgcgctgcgtatggaactccgccacagcggcataaaagtcagcctgattgagcctgggccaatccgcacccgctttaccaacaatgttaaccagaccggtgataagacggtagaaaaccccggtattgccgcgcgctttacgctcggtccggaggcggtggtggaaaaagtgcgtcacgccttcgtcagcgacaagccgaaactgcgctatccggtgacgctggtcacccacgcggtaggctggttaaaacgcctgctgccggcccgtgcgatggacaaaattatccagggctgagttgaagcgctgaatgtcgcccccatctaaaacagaaatcgaccaacgagatacgctcatgtccgaacagaatattgtcaatattaccgaagctaatctgcagcagacgctgcagcaatccatgaacgcgccggtgctgttttacttctggtccgcccgcagccagcactgcgaacaactgacgccggtgcttgagcgcctggccgcccaataccacggtcagtttacgctggcgaaagtagattgcgacgcggagcaaatgctggcctcgcagtttggtctgcgcgcgatcccaacggtgtatctgttccagaacggccagccggtcgatggttttgaaggcccgcagccggaagaggctatccgcgccctgctggataaagtgctgccgcgcgaagaagaattgaaagcgcaagaagcgctggcgctgatgcaggaagaaaaatacgccgacgcgctgccgctgctgaaagacgcctggcagttatctaaccaggatagccagattggcctgctgctggcggaaacgcttattgccctgcagcgttccgatgaagctgaaagcgtgctgaaaaccgtgccgctgcaggatcaggacacccgttatcaggggctggtggcgcagattgaactgcttaagcaggctgcgaatacccctgaaatccagcaactgcagcagcaggtggagcagaacccggacgacgcggcgctggcgtctcagctggcgttgcagttacaccaggtcgggcgcaacgaagaagcgctggcgctgctgttcacgcatctacaaaaagatttaggcgccggcgatggccaggtgcgcaaaatgctgcaggagatcctcgcggcgctcggcaccggcgacgccctggcggcgaaataccgccgccagctgtattcattgctgtattaatcagaggcgctgccccggatagcgctacgcttatccgggctacagattacacagtggcagcccgggtaaggcgtgtacgccgcaacccgggaatgcttatgggcgctttttcaactgcgtcaccaccagttgatgacgggcattgaagaacttccggtaggtcagatagccggcaataatcgtcgacaggctggcggtcgacagcaacataaacgtgaccataatctgatacttaattgccttcaccgggtctatcccggcaaaaatcagtcccgacatcatccctggcaaactcaccaacccgaccgttttcgccgaatccaccgtgggaatcaacgaggcgcgaatgctgtcgcggatcagccgtgcggaggccatcttcggcgtagcgccgaggcttagcttctcctgaatctgctgctgctcgctgttaaaacgctggcccatattgttgtagcacagccctaccgccaccatggcgttaccggccaccatgccggcaatcggaataacctgcatcggcacaaaggcgatcgaccccgagaagaccagcaccgccagggttagtccggcgccggtggtaatagcgataaacgatgaaacaaaagctttgtcgatatatttactgcgcttcttcgcattccacgccgcgttaaagcagataaacagcaccatcaatagcgtcaacaccgcatggttgacgttaaagatatatttcaacacgtagccgacgataatcaattgcactatcgcccggcaaatactccagatgatatctttttccagcgccagtttttcccgatagctgacgacgatcgccaccagcaccagcaccatcgagagcgccagcgattcgttagtaatattatgcccgttcatttttcacctcctgcattttcccgccagcaggctgtagcgtaatcacctcatcagcgtgagcaatttcgttctgatcgtgagtgacccacagaatggccatccctctttccgtcgcgtagcgatgaataatctcgttaacgttttgcttattactttcatccagcgcgctggtaatttcatcaagcagcagaacctgcggtagaaactgcaaattacgaatgagcgagacccgctgtttttcaccgccagaaagctcattaatggatttctccagcgtattatccgccagcccgaagcgttcgagatcggcaaccagcgctttaggatccggctgtttgttgcggatctgccatgggaagaccaggttgtcatagaccgaatcgccaaatagcgccggggtttgcgcgcaatacgaaacctgctggcgatagtgttctggcgacagcgtggcgatatctttatcgttgaaaaaaatctctccgctggtcgggctcagcagcgaggcgataattttcagcagcgtacttttgccgcatccggatggcccggtaatcaacttaaattccccggccgcaatccggagatcgatattattcaggatgaccacgtcgtcggttttaaaaccgacgccctcgaggcgcaaaatcgcgttattttccttcattatatgtccagtttatttcctaaaacccagacagtttactccagttttctttcaccggaacaaggagaaagttatactctgtttaaacatgcgccatttcgctgcggcgcccatcaggcaacaagacaggaggtttttgatgctgatttttatccccgttcttatttttgtcgcactggtcattgtgggggcggcagtaaaaatcgtgccgcagggatatcaatggaccgtcgaacgctttggccgctacacgcagacgctgcagccgggtttaagtttagtggtgccgtttatggaccgcatcggccgtaaagtgaacatgatggagcaggtgctggatatcccttcgcaggaagtcatctctcgcgataacgccaacgtcactattgacgccgtctgcttcattcaggtgatcgatgcgccaaaagccgcctatgaagtcagcaatcttgagctggcgatcgtcaatctgacgatgaccaatattcgtaccgtactcggctcgatggagctggatgaaatgctctcccagcgcgatagcattaacacccgcctgctgcatatcgtcgacgacgccactaatccgtggggggtaaaaatcacccgtgtcgaaatccgcgacgttcgcccgccagcggagcttatctcctcgatgaacgcccagatgaaagccgagcgaaccaaacgcgcctatatcctggaggccgaaggggtgcgccaggcggaaattctcaaggccgaaggcgaaaagcagtcgcagatcctcaaagccgaaggcgaacgtcagtctgccttcctgcaggcggaagcccgtgaacgttcagccgaagcggaagcccgcgccacccagatggtgtcatcggcgattgcctcaggggacattcaggcgattaactacttcgtggcacagaaatataccgacgcgctgcagcagattggcgccgccaacaacagcaaagtggtgctgatgccgctggatgccagcagcctgatgggctcgatagccgggatcggcgaactgctgaaagagagtagtgctgaacggaaaaaatcatgatcgccctgatcctcgcccatccacatattttctggctgacccttggcgggctgttgctggcggcagagatgctcggcagcaatggctacctgctgtggagcggcgtagctggcgtcgtcaccggcctgctgacctgggctattccattcagttgggaatggcaagggacgctgtttgccgtccttaccctgctggcggcatggctgtggtcaaaatggctacgtaaacgcatgaggcagcagcgccccgccgacgcgcagcttaaccagcgcggccagcagctggttggccgtcgtttcactctcgacaacgcgctggaaaacggtcgcggccacgtccgcgtcggcgatagctcctggccggtgattgccgatgaagacctcgcggcgggcagcaaggttgaagtagtcgccgtcgaagggattaccttgcgggtaagagccgccatccgctaagcctgcgctttgcggtgacagcagccggaaaggttatcaattattgggcaatccgcgctgtcatcgccggggcaggcgtccgccagcgccagcagatgcgcacgcatgttttgcaactcacggatatggttctcaatatccgcgactttctccagcgttcgttttttcacatcggcgctgtgccgcgacggatcgttgaataacgtcaccagctcgcggcactcttccaggttaaatcccacctgccgcgcctgacgcagcagcgtcagttcatcaaggtgcttctgagtgtaggtacggtagccgttatcgctgcgcagcggcgccgtcaccagccctttctcttcgtaaaaacgaatcgctttgctggttaaaccggtttttttcgccacatcgctaatattcatttttcccccttgaccttcccttgctggaaggtttaaccttcttaatactcgatgaaagagtgtgttcggtcaatcattaaccggaaattattcaggagttatttatgtctaacactattgacctgacgcttgatggcctctcctgcggccactgcgttaaacgcgtgaaagagagccttgaacagcgtcccgacgttgaacaggcggaggttaccgttaccgaagcccacgttacgggcagcgccagcgctgaagccctgattgagaccatcaaacaagccggatacggcgcggagctcagccacccaaaggctaaaccgctggcagaatcatcaatcccgtcggaagcactgacagcggccactcccgagcttccggcagcccatgacgaggatgacagtcaacagctgctgatcaacggcatgagctgcgccagctgcgtttcccgggtacaaaacgcgcttgccgcggtgccgggagtctcacaggcgcgggtaaacctggcggaacgcacggcgctggtgatgggcagtgcgtccgccgcagaattagtgcaggcggtggaaaaagccggctacggcgcggaggctatcgaagacgatctggaacgccgcgaacgacagcaggaaaccgccatcgccaccatgaaacgttttcgctggcaggcgattgtcgccctgctggtcggcgtaccggttatggtctggggcatgatcggcgataacatgatggtcagcgacgacaatcgatcgctgtggctggtcatcggccttatcaccctcgcggtgatggtcttcgctggcggtcacttctaccgcagcgcctggaaaagcctgaaaaacggcaccgccaccatggatacgctggtcgccctgggaactggcgtcgcctggctctattcaatgagcgtcaacctgtggccgcagtggtttccgatggaagcgcgccacctgtattacgaagccagcgcaatgatcattggtcttatcaacctcggccatatgctggaagcccgcgcgcgccagcgctcctcgaaagcgctggaaaaactgctcgacctgacgccgccttcggcacgcgttgtgacgcctgcaggggaaaaggatttgccgctcgctgaagttgaggcgggtatgacgctgcgcctgaccactggcgatcgcgttccggttgacggcgtgataagccagggcgaagcctggtttgatgaggcgatgctcaccggcgagccggtgccgcagcaaaaaggcgatggcgacgccattcatgccggtaccgtggtgcaggatggcagcgtgctgtttaccgccagcgccgtcggcagccagaccacgctggcgcggattattcgcatggtgcgccaggcgcaaagtagcaaaccggaaatcggccaactggcagataaaatctcggcggtatttgttccggcagtagtagccattgcgctaattagcgccggtatctggtacttcttcggcccggcgccgcaaatcgtctataccctggtcattgccaccacggtactgattatcgcctgtccatgcgcgctgggcctggcaacaccgatgtcgattatctccggcgtcggccgggcggcagagtatggtgtgctggtgcgtgacgccgatgctctgcagcgcgccagcgagctcgatacgctggtgtttgataaaaccggtaccctgaccgaaggcaagccgcaggtggtggccgtgaaaaccttcgcaggggttgatgaaacaaccgccgtgcgtcttgccgccgcgctcgagcaaggttcaagccatccgctggcgcgggcgatcctcgataaagccgccgacagtactttaccggaagtaagcggcttccgtaccctgcgcgggctcggcgtcagcggtgaagcggaaggccgtcgactgctgctcggcaaccaggcgctgcttaacgagcagcatatcgccacagccgaactggaaagcgagatgacaacacaggcctcgcgcggcgccacgccggtactgctggcgatcgatggtcaggccgccgcgctgttcgccatccgcgacccgctacgtgaagatagcatcgacgcgctggcgcgcctgcatcgtcagggctaccggttggtcatgctcaccggggataaccctaccaccgccaatgccatcgccaaagaagcgggcattgatgaagtgatcgccggcgtgctgccggacggcaaagccgatgccattaaacgtctgcagagcgaaggacataaagtggcgatggtcggcgacggtattaacgacgccccggcgctggcgcaggcggatgtcggtatcgccatgggcggcggcagcgatgtcgccattgaaaccgcagcgatcactctgatgcgccatagccttaacggcgtggccgatgctttagcgatttcgaaggcgacgttacgcaatatgaaacaaaacctgctgggcgcgtttgtctataactcgctgggcatcccgattgccgccgggatcctctggccgctgaccggtaccctgctgaacccggtggtcgccggcgcggcaatggcgctgtcgtcaatcaccgtggtgagtaacgctaaccgcctgctgcgctttaaaccgaaagaataagcacagccacaggaaaacgggcgctgaggttactcagcgtccgtttatttattggcgacaataaaaacccgcgggaaagatgacggccaccaccagatgcgctagcatgaatgcctcacacttcggagcgcgtatgggcctgttaaaccgaataaaaatgctgtggcgagccgccgccggctcgtcttattcctggcctgcaatggatatcgtcctgcccggcgaccgttatttacatctcgtcggcagcattcatatgggcacccgcgacatggcgccgccgccggctaagctactgaaaaaaatacgtcaggccgacgccttaatcgtcgaagcggatatcaccggtaatgaaacgcctttcagtaatctcccctcttatccaccgctggctgaacgtctgagcgaaacgcaattagcagaattacgctcacgcgccggcgaactgggtttgtcggtcgatcttttcgatagccagccgttatggcaggtggcgatggtgctacaagccacacaggcgcaaaagctgggattacggcccgattacggcattgattatcagttgctgatggctgcccgcgagagcaacataagggtgatggagttagaaggcgccgacagccaaatcgcgctgctgcgcgatctaccagacggtggtaaggcgctactggaagatacgctgacccactggcgcaccaacgcccgtttactgcaggtgatgatcggctggtggctcgagcaaccgccgtcgcgcggcgcggaaacgctgccgacgaccttcagccagtctttatatgatgtactgatgcatcagcgcaatatagcctggcgcgacacgctgcttgctctgccacctgggcgttacgtcgtcgccgtcggcgcgctgcatctgtatggcgaagggaacctgccggatatgttgacgtaaaaaaatggccaatattgctattggcccgtcaaagaggaatttcatcattattattatcccgggatatacatcccggatcgtctgattgtcgctcaaagtgaccatcactgccaatactattgagcaagatggtactattttttatacaaccttcacgcgtatgctgttcatacgttaggtcggttggtaagaaggattactatgactcccgccgttaaattactcgaaaaaaacaaaatcacctttcagatccacagctacgaacacgatcctcaagagaccaattttggcgatgaagtggttcgcaagctggggcttaatgcggatcaggtttacaagacgctattagtggccgttaacggcgatatgaaacatctggcggtcgccgtcaccccggttgccggacagttggatttgaagaaagtagccaaagcgctgggcgccaagaaggtagatatggccgacccaatggtcgcacagcggatcaccggatatctggtcggcggcatcagcccgctggggcagaaaaagcgcctgccgacggtgattgatgccccggcgcaggagtttgccaccatctatatttccggcggcaaacgcgggctcgacatcgaactggcggcaagcgatctggcgaagcttctggacgcgaagttcgccgatatcgcccgccgcgattgaacacactatcccggatagcggcgcacgcgccttatccgggccccgctaagcgatggcttactgccagctgacctcgccctttggctcataagccgccgcatccagcggtgagttcttctcgatgtactctttcagcacctcggcatcgataaagccggtatttacgtatcccggtttattatcgatgtgcgggtagccgtcaccgccggtggcgttaaagctcagcgtcgccatacggtaagttttcgccggatccaccggttcgcctttgattttcagatcgttaagcttgccatctttggcaatgaaactgacgttggcgaactgcggataagcgccggaatccggcttcatctgcgcgacggcggtcaggtactcaatcacctctttaccgctcatatcgacgtaagtcagcacgttgccgaacggctgcactttcatcacgtctttataggtaatatcacccgcttcgatggagtcgcgaataccgccgccgctcatcaccgcgaaatcagcattgctgcgcgccatctgcgccgccagcagcagacgccccatattggtttgtacgaagcggactttgctgcgatcgccttcaagatggccgttgacgctgcctattttcacctgtaactgcgccttgcctttattctggaacggcgttaacagcgagagcatctgcgggttttcggcaatctgcggcgtatacaacacgcgctcactctgaccgttatcccaggtgactttcttcttcaggttgaccgggatcagctgatagtgcaccagcttcatctcaccgttgcggaattcaaaatcggcgcggccgacatatttaccccactcgtgagcctgcacgatccagatgccattctggcgatccggcgcgcacggggtaccggggacataatcgacctgctttttattttccgacgccatgcataccggatcctgcgagtggccgccgacgatcatcgccagcgctcccgcaggtagactgcgcgccatttcaacgtcgccaggcgcgttagagccgtgattgccgttgtcatagtggcccatatgggtggtcgccagaatcacgtccggcttttcattttgctgtaattcctggatgaccagcttggcttctgccgccggattacggaattcgatatcggtgaaatattccgggttgccgattttcgccgtatcgtcggttgttaagccaatcacggcaatgttcagcccgcctcgcttaaacagcgcccagggtttaaacaggcgttcgccggtgcttttctgatagatattggccgacaggaacgggaactttgaccacttctcctgctggcgcagcacgctgagcgggttatcaaactcatggttgccgaccgccatggcatcgtagccaatcaggttcatgccgcgaaaatcgggttctgcatcctgtaaatcggattccggcaccccggtattgatatcgccgccggacagcagcaggacgctaccgccttcggccgccacctctttgcggataccgtccaccagcgtcttctgcgccgcaaggccatattcgccataatcgttgcgccagaaatgaccgtggtggtcgttagtgtgcaggatggtgattttataggttttgtcctgctcataggcctgcgctgacaggcttcccagcgataaggcggcgaataacgccagcgccacgccgcgttttaaataatgcatgtttcactccctgacttaataacaagtgccgaaagtatagcgagtcagccgctttgacaaatatgttttcagaattgcgacttccttcaaaccttagggacaggtatgttagtctgataataattctacccgtcatacttcaagttgcatgtgcgttggctttcctcgctcaccccagtcacttactagagtaagctcctggggattctctgtgtcgccgccttcttgcaactcgaattatttagggtatcaacctgcattctctacaacaaatagaactcgctgaagtgaacctatgacaaccaaccaatccgctcagtccttacccggtaccggcgcgccgctgcaaaaagcgcgcacctcatttggcattctgggagcaattagcctctcccatctgctaaacgatatgatccagtcgctcatcctggcgatttatccgctgctgcaggcggaattctcgttaactttcgtgcagatcggcatgatcaccctcaccttccagctgacgtcatcgcttttccagccggtgattggctacatcaccgataaacgctcgatgccgtggtcattaccggtggggatgtgtttcaccctctgcggcttaattctgttagcgctggccggcagcttcggcatggtgctgctggccgctgcgcttgtcggcaccggctcttcggtcttccatccggagtcctcacgcgtggcgcggatggcctccggcggccgtcacggtctggcgcaatcgctattccaggttggcggcaacttcggcagctcgctggggccgctactggcggcggtgatcatcgctccctacggcaaaggcaacgtcgcctggttcgtgctggccgcgctgctggcgatcgtcgtgctgtcgcaaatcagccgctggtacgccgcgcaacaccggatgaataaaggcaagccgaagccggttatcgttaatccgctgccacgtaacaaggtcatcctggccgtcagcattctgttaatgctgattttctccaaatacttctacatggcgagcattagcagctattataccttttatctgatacacaaattcggattatcggtgcaaaacgcccaacttcacttgttcgccttcctgtttgcagtggccgcaggaacggttattggcgggcctgttggcgataagataggtcgtaaatatgtaatttggggctctatcctcggcgtggcgccatttacccttattttaccgtacgcatcgctggaatggaccgggatcctgacggtgataattggttttatcctcgcatcagccttttccgctatcctggtctatgcccaggagctgttgccggggagaatcggtatggtttccggcctgttctttggtttcgcgtttggcatgggcggccttggcgccgcggtgttggggttgttagccgaccataccagcatcgatctggtctataaaatctgtgctttcctgccgcttctcggcattctgacgatattcctgcctaataaccatcaaaaagcctgagtatctggcggccaaagtgaaagtttggccgccacaaccccttatcccatcagcattacgccgccatgacctgtcgccattttcctgtctgtgctttttgctgccgtaattccaatttttcgcaaatttcaataattattcataaacaaaacgagcaaaagtgtcataaactattaatcggttttttgctttaagtagcgaaaatggatcggctcaccacacgcaaggagacggaatgcatcacgcaacaccgctaatcaccaccattgtcggcggccttgtgctcgcctttatcctcggcatgattgccaataagctacgtatttcaccactggtaggatatttattagcgggcgtgctggccggtccatttactcctggttttgttgcggataccaagcttgcgcctgaactggccgaacttggcgtcatcctgctgatgtttggcgtcgggctgcacttttcgctgaaagatctcatggcggtaaagtcgatagccattcccggcgctatcgcccagatagccgtggcgacgctgctcgggatggcgctctcttccctgctcggctggtcgctgatgaccggcatcgtttttggcctgtgtctttccaccgccagtaccgtggtgctgctgcgcgctctggaggaacggcagcttattgatagccagcgtgggcaaatcgccatcggctggttgatcgttgaagatttagtgatggtactgacgctggtgctgctgcccgctatcgccgggatggtcgaaaaaggcgatgtcgggctggcgtcgctggcgctcgacatgggcattaccatcggtaaagtggtcgcctttatcgccataatgatgctggtgggacgacgtctggtgccgtggatcatgtcgcgcagtgcggcaaccggctcacgcgaactgtttaccctgtcggtgctggcgctggcgctcggcatcgccttcggcgccgttgagctgttcgacgtctccttcgcattgggggcattcttcgccggaatggtgcttaacgaatccgaacttagccaccgcgccgctcacgatacgctgccgctgcgcgatgccttcgcggtgctgttctttgtctccgtcgggatgctatttgacccgatgattctggtcgaacagccgctggcggtgctggcgacgctggcgattatcatctttggtaaatccgccgccgctttcttcctggtacgtatgttcggccattcgccgcgtaccgccctgaccatcgccgcaagccttgcgcaaatcggggaattcgcttttattcttgccggtctcggcatggcgctggatctgctgccgcaggccgggcagaacctggtgctggctggggcgataatttcgattatgcttaacccggtgctgtttaccctgctggaaaaatatctcgataaaaccgaaacccttgacgagcagacgctggaagaggtgctggaagacgaaaaacaggtgccggtggatatctgcaaccatgctctgctggtcggctttggccgcgtcggcagcctgcttggcgagaaactgatggcccagggaatcccgctggtggtgattgaaacctcccgcacccgcgtggatgagctgcgtgagcgcggcatcagcgccgtgttgggcaatgccgccaacgaagagatcatgaatctggcgcatctcgactgcgcccgctggctgctgctgaccattcctaacggctatgaagccggtgaaattgtcgcctcggcgcgggaaaaatgtccgaacattgagattatcgctcgcgcccattacgacgatgaggtcgattatattaccgaacgcggagccaatcaggtggtgatgggggaacgcgaaatcgcgcgggcgatgttacgtctgctggaaacgccgccggctggcgagattgttaccggttgatacgacgccccgctcgcggggcgtactcttatccgctggattaacggtcccagtaggcctcttccagactatcttcccgctccggcaggccgcgggttaaacgcggcgaatgctgattcagcacctgatagctgacgcggttggcgtatttacacacctgcgccagcgatgagtaggtcagccatttgcatttatgtttgctggaattcggcacgttattacgatggtaattattggcggtgatatcatgcaacaacgccgccagcgcgccgtcgcctgcgccgttggtgttcatgatcttctccggcccgcccatataaggcgcgatgtgcgaatagatacgcagcggattaacacaatcctgatggcgcatcgcgcggctgaattcatactggttgaactcggcaatcgcccccggcaggagcggatgctgtgttttacgcttcgcttcctcttcggtgaagctcgccatatagagacccgccggtcctgcggtgcacagcaccaggtcgacccagtccagcgccttatccgccgcggtgagcgggtcggcgataccggtcagcgcttccgcttcttcttcattcatcgccagaatcgaaacgtgttccttgaggaactgctgccaccattgagggttgtcggcaatcacgtatttcgttcccagcgtcagcaccaccggcacgtcatgctttttggcatactcaatggctttcatcgtcgcgtccggcatcggctcgcccggcttacagcgcacgaggtaggaggtcagcaccagtgcggaagcgccggcaatcacctcttccggaatgctttccggacgcagcttgttcatgtgaccaggactgatggcaaaggtacgttcgccgctatcgctaatcagcgtaaaacagcggccaatggcgccatcaacgccctgcaggtagttcaggtcagtacggctggaggtattgcacaagtagcgataagcgtagccgccgatctcaatgttgctgcacatcacgccgagcagcaccgagcggtcgtccgccagcaccgaataattgtgcatggtattgccaatggtgccgccggcaaattgatgggtgatcaggccgtcgcgtaccagttcctgatacagcgcttcggcgacatcatcttcaattaccagcgaatgaccggcgctcaggccgtagcgtacgataaacgcctcatccactttcgcttcgatatccaccagcgtctggtcgatgccaaccacccaggagacgttggactcattttctggctgaatttgttgcagcagcggatcgcgagcgctaacggggaaatagtgtttagatttgcgtttaccgggaaatttcatagtggcgatttaatgacagggaacaagcggggaatagtagcatattccccgccacgcgcgcgatcagcgatacgacgcggtcaggttcaccatcatctcaatatgtgcaggatcggcattaagcgccggaatatactcatattgcttaccgccggcctcaaggaaaatttcccggttctgcaccgcgatttcttccagcgtttccagacagtcggcggagaagcccggacagataacctgaacgtgctgtgtgcccttctcgccgagcatttttagcgtttcgtcggtatatggcgtcaaccagggttcgcgaccaaagcgcgactggaaggtcatcatcacccgctccggcggcagcccgagcaccgaaaccagctcgcgagtcgttacccggcagcgctgcgggtaatcatcgccctcatgggcgtagcgttgcggaataccgtgataggagagcagcagcacatccggttcgccgtgaacggcaaacgaagcgcgcacgctggccgccagcgcgtggatatagtcagcgtcgtcggcatagtcgcggataaacgaaacgcccggaatggcgcgctttttcgcgaggatccgcgccagctcatcccataccgccgccacggtagaacacgaatattgcggatacagcggcaataccacgatatggtcaacgtcctgggccaatagctcatcgacagcgcttgccagcgacggcgagccatagctcatccccagcgcgactggaacatcgggtagcctggccgccagcgcttgctgctgttgccggctatacaccatcaacggcgagccttccgccatccacacggactgatagagcttcgccacgcggggagcgcgaatcggcagtatgatgccgcgcagtagcggccaccacagcagacgaggcgtatccactacccgtttgtcgctaagaaattgtcgcagatagcgcttcaccgcatcgggcgtgggcgcatcgggagtgcctaaattggctagcaaaatacctgttttcgtctgatgcattaccgcctcttaaccatttgaatcgctgacaattgtagcgtaaatggcgttaaacggaaccaatcatagcaaaaggtagaaatgagaggtgttctcatcctgccgcagcaggatgagaaagggcttaattagccgaggattttttccagatcggcgcgcacatcagccaccgctttggtgccgtcgactttcgcatattgggtgttacccgcctgcgcttctttctgatagtagccgatcagcggcgcagtcatctgatggtattccaccaggcgcttacgtacggtttcttcctgatcgtctttacgggtggtcagctcttcgccggtcacgtcgtctttaccttccaccttcggcgggttgaatttgatgtgatagacgcggccagaagcggcgtgtacgcggcggccaacgatacgatcgacgatcagttcgtccggtaccgcgaactccagaacgtagtcaacggcgatgccggcttctttcatagcgtcagcctgcgggatagtacgcgggaagccatccagcaggaaaccgttacggcaatcttcctgggcgatacgctctttcaccagtgcgatgaccagctcatcggtcaccagtttgccggcgtccataatgtctttcgcttgtttaccgagctcggagccggattttaccgcggcgcgcagcatatcgccggtggagatttgcggaataccgtatttctccatgatgaactgagcctgagttcctttacccgcgcccggagcgccaagcagaataatacgcattacgaaaatccctcaaatgtcgtttcaatttttcaaaaaacgctaaaccataccaccagaacggccatggctcaaggaaggcggtgcggctgaaacggttaatggtcagatattttatgcaatctaatgtgaaatgccccgtatgagcaaatcactcagacggggcatttattccgttcccggcgtcgcgtcgctcggccgggctactcattcaggttcgcgtcaggatgccagcagctgattcatacggcggatgaactggttaggatcctccagcgtaccgcgttccgccagcagcgcctgatccagcagcagttcaacccactcgccaaactgcgcgtcgtcctgggtatcggcagcgcgtttcaccagcggatgcgccgggttcagctcgaagatatacttcacttccggcgccgcctgaccggcagcggcgaacagcttcgccatctgggtgctcatttcgtcggcatcggtggtgacaatcgccggagtgtcggtcagacgatgcgtcagacgcacctctttcacgcgctcacccagcaggcctttcacacgctcaacgaacggctccagcgctttttcggcttctttggtggattcgtcaacttcgtccgccagcttctccagcgactcgtcggctttggcaaccgactggaacgccttgccgtcgaactcggtcaggtagctcatcatccactcgtcaatgcgatcggacagcagcagaacttcgatacctttcttgcgcagcagctcgagatgcgggctgctcttcgccgccgcatagctgtcggcggtgatgtagtagatcttctcctgcccttctttcatgcgcgagacgtactcttccagcgacacggtctgcgcggaagaatcggtatgagtagtggcgaagcgcagcagtttagcaatagcttgctgattggaagcatcttccgctgggccttctttcagcaccaggccaaactgtttccagaaggtctgatatttttcggcgtcgtctttcgccagcttttccagcatctgcagcacgcgtttggtcagcgcggtgcgcaggttacgggtgacgttgctatcctgcaggatttcacgcgacacgttcagcggcagatcgttggaatctatcaggccgcgaacgaaacgcaggtagttcggcataaactgctcggcgtcatccatgatgaagacgcgttgcacatacagcttcaggccgtgtttatgatcgcggttccacatgtcccacggcgcctgcgacggaatatacagcaggctggtgtactcctgcttaccttcgacgcggttgtggctccaggtcagcggatcgctgaaatcatgggcaatatgcttatagaactctttgtattcatcgtcgctgacttcagatttgctgcgggtccacagcgcctgcgccttgttgattttttcccacgaaataacggtttcgccgtccacttcttcgcgtttttcaatctcaaccggcagcgcgatatggtcagaatatttgctgatgatcgaacgcacgcgccagtcgttgaggaagtcatcttcaccttcacgcagatgcaacgtgatttcggttccgcgatcggccttagtgatatcggcgacagtatattcgccttcaccagcggattcccagaacacgccgttttccggcttgtcgcccgcggcgcgggtgcgcacggtaactttgtcggcaacgatgaaggccgaatagaagccaacgccgaactggccgatcagctggctatctttcgcttgatcggaacccatagattcgaggaacgccttggtgcccgatttggcgatggtcccgagatggtcaatgacctcgtcgcggttcatcccgataccgttatcggcgatggtcagcgtacggttgtctttatcaaacgatacgcgtacgcgcagctcgccgtcgccttcatacagatccggctgggaaagcgcacggaaacgcagcttatccgccgcatccgaggcgttggagatgagctcgcgcaggaagatttctttgttggaataaagagaatggatcatcaggtgcagaagctgtttcacttctgactggaaaccacgggtttcttgtcctttcatgtaagtcgacctcaacaatgccatttattattaatggaaataacgtgttggggaggagatggggataggtgcggaaaatttcaagcggaggcggcgaatgcagcctccatttgttcagaaaataatcttgtgacgcccggccagtgagtgggacagcgtggtgccgtcgaccatttccagctcgccgccaaccggtacgccgtgggcgatgcggctggcgtcaacgccatactgcgcgcagagttcagcgatgtagttggccgtcgcctcgccttcaaccgttgggttggtggcgaggatcagctcgctgattgactcggcttcaagacgttgttcaagacgatcgagcccgatgtcatccggcccgatgccgtcaagcggcgacaggtggcccatcagcacgaagtaacggccggaatactgcccggtctgctcaatggcgtagatgtccgcaggactctccaccacgcagatctgaccgttttcctggcgacgcggattgctgcaaatattgcacacctcctgctcggtgaaggtgcggcaatcggcgcagtggccgatttccgacatcgcgcgcgtcagcgcctgcgccagacgcataccgccgctgcgatcgcgctgcagcagcgtaaacgccatgcgctgcgccgacttcgggccaacgcccggcagacagcgcagcgcttccataagctgagttaacagcgggctggtttgcatcagaacggcatcttgaagcctggcggcagctgcatgccggcagaaacggaggccattttctctttctgggtctcttcaatgcggcgcgcagcatcgttgaacgcggcagccaccagatcttccagcatctctttgtcgtcttccagcaggcttgggtcgatttccacgcggcggcaattatgcgcgccgttgatggtcacttttaccagacccgcgccggactcaccggtcacttccagctgcgcgatctcttcctgcattttctgcattttgtcttgcatctgctgggcctgtttcatcaggttacccaggccgccttttccaccaaacataggcttctctctcagtaagtcatcgttaagggtactgaacgccagtcagactggcgttcaaatggggcggatactctcttcatccagatcggcgtcgaagaatcgtcgcagggtctgaacgttgttatccgcaataattgcctcgcgcgcctgcgcgagcttctcttcataaattgcctgtcgccactccagcggcgtgcgcatcgccgaattatcgtcttcaacgatggtcaattcaaccggcgcaccgtacaacacgcccagcgcttcggccagtttttgctgcgcgccagtggagttgagatggcgctgactcgggcgcagatgcaggcatatgcgattgccgtcctgctctttccacgcgttcagcgcgacctgttcaaccagtttcggtaccgccaattggctcacttccgctgcccagctatcgcgctcgaccgcttccacggccagtttcgccgccagttccggcgttttttcatgctccagcgcttttttcaacgcctttggcgtggcgacttcgattttggtctcttcaatcggggccgtcgatttccagcgataggcttctttcttcgccggggcctgctcaagcgcggccgcagccggacgagcctgtacgcgctcggtaatcgaactcagtcgttccagcgcagcgttattcaccggccgcgcgcgggatgcggctgccggttcactcttttttggggtggttgctcccggggttcgctgcagccgactacgcgccgccagcacctggctggtgctttgcggcagattctgcggcggcggagccgatgcgaccgacgacgcagcttgttgcagcggcgcaggcgtagcggtctgcacgggcttcacttccggctccggcagcggctggcgcggatggaaagccagcgcgcgcagcagcgtcatttcaacccccatacgccggtctggcgcataaggcaactctttgcggccaatcagcagcgtctgatagtaaagctgcacgtcagccggcggcacggtacgcgccagctcgcgcattcgtagctcgacggcggccatatccgcccccagcgctgatggcgagagctgaaccatcgcgatacgatgcagcaggctttgcatttccaccagcagcgcttcccattcaacgccacgcgcggcggcgtcgctgacgcctgccatcacgcgctcgccgtcggcggccaccagcgcttctatcaaggatagcgcctgatcgtcgtcgagggtgccgagcatttcgctgacggactgcgcggttaagcggccatcgccgctggcgatggcctgatcggtcaggcttaacgcatcgcgcaagctgccatccgcggcgcgcgacagcagctgcagcgcacgcggctcaaacgcgatctgctcttcgccaaggatgtgttcaagctgatggcggatctgttcgacatccagcgccttgaggtggaactgcaggcagcgggacaaaatcgtcaccggcagtttttgcggatcggtggtcgccagcaggaatttgacgtgcgcgggcggctcctccagcgttttcaataacgcgttgaagctgtgacgcgacagcatatgcacttcatcgatcaggtagaccttgaagcggccgcgggccggcgcgtactggacgttgtccagcagatcgcgggtatcttccactttggtgcgcgaggcggcatcgatctcaatcagatcgacaaagcggccttgttctatttcgcgacagttatcgcagacgccgcacggcgtcgcggtaataccgctttcgcagtttaaccccttcgccaacagacgggcgatggaggttttccctactccgcgggtgccggaaaagagatatgcgtgatggatgcgccctaacgataagccgttcgccagtgcggtcagcacatgttcctggccgacgacgtcagcaaaggtttgtgggcgccatttacgggctaagacctgataactcatgggctggctctgaaacgctggaaggtgaattcacgaaggggtaatgctatcacagccccgccggatcggcgaggctatgtgtcgggatttgcttagtggcccgggaaaggcaccaggctaaagcaattgatgcccagtttttccaggcgctgttcgccgcccagatcgaacagattgataataaaagcggcatcgtgaacttcgccgcccaggcgacgaatcagcttcactgtggcgtcaatagtgccgccggtcgccagcaggtcatcaacgaccagcaccttatcgccttctttaatggcatcaacgtggatttccagctgatcggtgccatattcaagctcatagctttcggcgatggtttcgcgcggcaacttgcgcggcttacgaaccggaacaaagccaacgcccagcgccaacgcaaccggggcgccgaacagaaaaccacgcgcttcggtccccaccactttggtgatgccggcgtctttataacgctcggtcagcagttcaatgctaagcgcataggctttagggtcttccagcaagctggtgacatcgcggaaaaggatgcccggtttcggataatcctggacgctttggatgctgttcttcagatattcaagctgctgtgcagttgcggtcataagtttatgcctgattgaaacggtgttacccacgggcgtgcaaaatgggccaaagaaacatttgtttaacctttgaccaggcttacccgcgctcgaaaacgccagaatttactggctgtcgccaacaattgcaacaggcattattgcgcatcagtgcttttgttgctttgcgtcaaccactggaatgcgccacataaatatcagcaggcagacgaggatcgtcagcagcaggatgcgcacccacataagcttaaccagccacagagaaatggcaaaggtcagtaaaatcatgataatggctcgcggcttggccccggcggcatcgcccggtactgttgccagtggcgaagatagcctccgaaccacgagcgatacagtagccattggtgaaagcgcggcgatgagcgggcaaaacaccatgcggcgagcaggataaatggcgttgtcggtaacagcggcaagaagacgcccagcgtccccagcactaccgccagccagccaatgatgattaaaataatacgtggcataatgcgaatcgttatcaagcagatgtcgctactgtagcacagatgctgagtagggaatggaggagttatttgaaaacaacccggcttttacaaacgctgaaaaatcagctggctgagctggcgcttcaggtggcgccgctgtccggccacgctacgttgagcccgcgtttcgaccgccagctgttccgtacccgcgacacccagatgcaggcgtatctcgacgaagcacagcataatctcgccgagctccagcatgccgttgagcatcagcatcttccccaggccgcctggctcgccgagcggttggtggcgcagattgccgccattagccgtgagacggcgacctggtcgttacgccaatgggacagcgcctcgccgacgttaaaccgctggcaacgccgccgccttcagcatcaggagtatgagcgccgcctgttggcaatgcgcaacgatcgccaacgtcagctggcatcggcaacgacgcttgccgaacagcaacggctaacgaaagaggtcgaggcctataccgggcgcctggcccgctgtcgcgatgcgctggaaaatattgaaaacgtactggcgcgtttaacgcgctaacaggagaggactatgtcgctggaagatgcaccggacgaggtcaaactggccgtcgatttaatcatgttgctggaggaaaaccgggtcaacgcaaagacggtgctgggagcgttggatattattaagcgcgactatgaaaacaaactgaaaaacgcccaacctgacgcgcctttatcagaaaaatagaacaattcggggcggcatatgccaccccgattagcgattatgcgacgcctggcgccgtatcatcccctttattatcgcgcttcacttccgtcacttcctcccccttctcgttacgcagatgaacttccagctgattgaaggcaatatcgatattgttttcgcggcacaggcgatcgatcgagcggttaagttcatccaccgcgtagctgcgatcgcgcagttcacgtacgtagagacgcagttcatgatccagcgtgctggcgccgaaggtggtaaagaagaccgccggcgccggttcctgcatcactttcggatgttcatgcgccgcctgcagcagcacctctttaactttatcgagatcggatccgtaggctacgcccaggcggatcaccacgcgggtgatggtatcggagagcgaccagttgatcagacgttcggtaacgaaggctttattcgggatgatcacctcttttcgatcgaaatcggtgatagtcgtcgcacggatacggatcttactgacggtgcctgagaaggtgccgatagtaaccgtatcgccgatccgcaccgggcgttcgaagagaatgatcaggccggagacgaagttaccgaagatctcttgtaagccgaaacctaaaccaaccgacagcgccgcggccagccactgcagtttatcccacgacacgcccagggagccgaataccgtcatcgcgccgatggcgataatcgcgtagttgaggatcgtcgtgatggcataggaagcgccctggcgcatattaagacgcgacagcaccagcacttccagcaggcccggcaagttgcggatcagcgcccaggcgaccatcgacgcgacaatcgcaaacagcaggctgcccatcgtcacgcttttcaccacgctggccccggcttcggtgccgttgtagtgccagagcgtaatgctgtcgagataggcgaacacggttatcagatcggaccaaatcgcccagaacaacaccgcgaacaacgccaccatcaccagcatggtgatgcgcagcgtttgttggttaacctgttcgagcgcgatcgtcggctcttcctgcggttcggcgccttccgccccttctttcaccagatgctggcgacgcgccagcgcccggcgccaggcaatgcgtcgcgccgccacgctcaggccgcgtagcacggtctggtacagcagattccacatcatcaccagatagacggtctcaatccagcggccagccagacgcagcgtcgtatagaagtaaccggtcgccgtgaggaccatcaacgcgacgggcacaatcgacaacacggtcaccgttagcaggcgcaggctgtgtgactctttgtcacgccagctttcgcggcacatcggccacaccagcaccgcaatgagcaacaggttgacgaagataacaaactgccccagcacgtcgtccatcaaattaagcggagagagctcagaaacaactgaccagaaattcagcggcagcagcgccaggctgacgcggacgatctgccgcctccagtggctggttagctgcgcgggcatgttgaaatgcttcaccgccacgccgtctttttccagcaccttccagcacaggccgaacaccagccagaacatcgccagtttcttactgtaagcccacagcaggttgctgacattcagttgcatggtcagcagaataagcccgacggcgaggatgagcagcaccaccggcagcgctctgatcaaatctatcaggatcgcttttggcgtgttgagctgggtatcattgcgtaactgacctacctgggaggccagcttcgcctggtaatcacgcagccactgcaagcgccagcggatcagcccggcaatcaatagcagcggcagcccggcgaggaacgcgataaataccgccggccaggctttctcccagttgacggtgattttcatcgatttgaactgggctttcagcgcttccgggaaggatttgatccactcccaatccatcggcttattgctgttcacccagaaaatttgctgggtcaggatcgatttcagattgctggagacgctcatcaactgctgctggttaatctgcaggttgatggccatcatcagctggttccccagctgtttgttaaactggtcgagcaattctcggcgcatgtccacgacttccaacagggcgtcgtgaacttccggcgtgacttcgctgctatggccctcttccagctttgccacaaaggcatcgctctggaataacgcatcgcgctgctggttaacttcaaactgctccaggcgcagatcggcaatgcggttagtcatatcctgcagctcatccgctgatggcaatgtttgctgctgctgatagaggatacgcgacagcagcaggctgcctttcaataccgaaatctgctctttgatatcgcgttcggattgcagcgcgcggtcgagccagtttttcactctgatattgcgctgcaccagttggttgccgttttccgtcgcctgaatcagcttttcgctaagctgatggttaacttcaagctcctgcttgaccaacgggttattttggatccgcgaggtctcctccggcgagaccgcttcctgagcggttttctcggtgagggtcagccgcttgctgttcaccgcttcctgcaacagttgcagctgatgttccagccggttgctgtgggcggtcacgtaatcgcgctgtttctgcagcgtatcctgcagaacggtattgccttccaggctcttacgctgctgttcgatttccgcattcagcaaggcctgctgcgccagcagcaacccctgctgcgtcgggcgcaacgtctcttcgccaggcgcggtgccgttgagacggttacgaatttgctgtagctgctgggaggcggagtacatcgcgttttgcacgcgctccggctgcgtctgcagcgagaccaattggctgttgtaggtcgccagatcgttctgcgcgctttgcagatcgtcaagcgcctgagacaccctggattcaagctgtcgcagcgacaacgtgctcagggttttacgggtgacctcatcatcaggaacgtcgctcagcgcattcaggctgtctaccgcctgacgcatttttgccggcgcctgttcaacctgctggcgcaactggacggtttcagactttatacgctcaatcttatcgagcgtttctaaagtctgcgtcaggtcctgctgaactaatttttcctgcggcgtgagttctttttgcttatttagcgtagtgagctggctttgaatgtcagaacggtcaggtaaatcagcagcctgaacctggctgaagctcagagtgccaactataaggaccagtgcaaagacaatggtggaaatagcatgaggccaacgatttgtatgctgcatagtattaacatgaatggttgcaaatgccggagaataccgggggtcgtcgcagcgcgcagaatagcacttctccctgcgcgcgaatagcggcagagataagtaaaatttacctttatttacgcctgctgattcaggccatgacctcagacgaacttcgtagcgacgggcaggtctgatacatctcaatgagcgcatcgacataagcgcgggcttccgcatgaaggttaaaactctctggcgcaaagagccagttttccattaatccggaaagataactgcgcatcagaattgccgcacggcgagtgagtaaattcgcaggtaattgttgagcagtgatacaatcttttaatgtttgctcaatacgatcgtagctttcaagccataaactgcgctgtgcttgttggacaacggccatttctccgacaaattcgcatttatggaagatgatttccatcatcaggcgcctacgctcctctactaccgtcgcttcgaggatatagacgagtatttcgcgaacaactgacagtggatcgttagggaattttgcccgatactcaacttcgagatcgctaatgctggcgtcagagagactccatatttcattaaacagatcggatttgtttttgaaatgccagtatatagcgcccctggtcactccagcagcttttgcaatcgcggccaacgaggtagatgataccccttgctgcgaaaacaatcgcagggcgacgtcaagaatcagttgccgggtttcaagtgcctgttgtttggtttttcgtgccataggttgatgactttacagaggttgcgtttacatacatttgtgaatgtatgtaccatagcatgaccataatagaaagactgtagtgggtttgtggacgtttgagccactaaaaaatttgaaattggacactcgaggtttacatatgaacaaaaacagagggttaacgcctctggcggtcgttctgatgctctcaggcagcttagcgctaacaggatgtgacgataaaccggctcaacaaggagcccagcaaatgccggaagtcggtattgtcacgctcaaatccgcacctctacaaatcaccactgaacttcctggtcgtaccaatgcttatcgtgtcgcagaagtccgtcctcaggtaagtggcattattctgaaacgtaacttcactgaaggcagcgatattcaggcgggggtgtctctttatcagatcgatccggcaacctatcaggcaagctatgaaagcgccaaaggcgacttagcgaaagcccaggccgccgcaaacatcgctcagttgacggtcaaacgttatcagaaactggttggcaccaaatacatcagccaacaagaatatgactcagccgttgccgacgctcagcaaagcaacgccgccgtcgtcgcggcgaaagccgcagttgaaaccgcgcgtatcaacctggcttataccaaagtgacgtcgccaatcagtggacgcatcggtaaatccgcggtcaccgaaggcgcgctggtgcaaaacgggcaatctaccgcgctggcgaccgttcagcagttggatcctatctatgttgacgttacccaatcgagcaacgatttcctgcgtctgaaacaggaactggcgaacggtaaactgaagcaagaaaacggtaaggcgaaagtcgaactggtcaccaatgacggtctgaaatatccgcaagagggtacgctggaattctccgacgtcaccgttgaccagaccaccggttctatcacgctgcgcgctatcttcccgaacccggaccacactctgctgccagggatgtttgttcgcgcgcgtctggaagaaggtattaacccggatgcgctgctggttccgcaacagggtgttacccgtaccccgcgcggcgatgccagcgtgatggtggtcggcgaaggcgacaaagttgaagtgcgccaggtgaccgcgactcaggctatcggcgacaagtggttagtgaccgaaggtctgaaatcaggcgatcgcgtgatcgtcgctggcctgcaaaaagtcaaaccaggcgtacaggtaaaagcgcaggaagtagcttcagacaaccaacagcaaaccgccggcaacgcgaacgctcagtctgaacaaaccaagtcttaacttaaacaggagccgttaagacatgcctaatttctttatcgatcgccccatatttgcatgggtgatcgccataatcatcatgttggcaggggggctttcgattatgaaactccccgtggcgcaatatccaacgattgcgccgccagcagtgacgatctcggccacctatccgggggctgatgcgaaaacggtgcaggacaccgtgacacaggttatcgaacagaatatgaacggtatcgataacctgatgtacatgtcctcgaacagtgactccaccggtacggtgcagatcacccttaccttccagtccggtaccgacgcagatatcgcccaggtacaggtgcagaataagctgcagttggcgatgccgctgctgccgcaggaagtacaacaacagggcgtgagcgtggagaaatcctccagtagcttcctgatggttgtcgggttatcaacactaacggcaccatgacgcaggaggatatttccgactacgtgggcgccaatatgaaggatgccatcagccgtacatccggcgtcggcgacgttcagctgttcggttcccagtacgcgatgcgtatctggatggacccgacgaagctaaacaacttccagctgactccggtagatgtcatcaacgccattaaagcgcagaacgcccaggtcgcggcgggtcagttaggcggtacgccgccggtgaaaggccagcagttgaacgcctcgatcatcgcccagacgcgtctgacttccgctgatgaattcagtaagattctgctgaaagtcaatcaggatggttcacaggttcgtctgcgcgacgtggcgaaagttgaactcggcggcgaaaactacgacatcatcgcgaagtttaacggtcaaccggcttccggtctggggattaaactggccaccggtgctaacgccctggataccgccaacgccatccgcgccgagctggcgaagatggaaccgtacttcccgtcaggcctgaaaatcgtctacccgtacgatactactccgttcgtgaaaatctctattcatgaagtggtaaaaacgctggtggaagcgatcatcctggtgttcctggtcatgtatctgttcttgcagaacttccgcgccacgttgatcccgaccattgcggtaccggtggtattgcttgggacattcgccatcctggcggtgtttggcttctcgataaacaccctgacgatgttcgggatggtgctggccatcggcttgctggtggatgacgccatcgtggtagtagaaaacgtcgagcgcgtgatggcggaggaaggattaccgccgaaagaagcgacccgtaagtcgatgggtcagattcaaggcgcgctggtcggtattgcgatggtgctgtctgcggtatttatcccgatggccttcttcggcggttcaaccggcgcgatttatcgccagttctcgatcactatcgtttccgcgatggcgctgtcggtactggtagcgctgattctgacgccagcgctgtgcgccaccatgctgaaaccgattcagaaaggcggccatggcgagcacaaaggcttcttcggctggtttaaccgcatgttcgataagagcacgcaccattacaccgacagcgtaggcaacattctgcgtagtaccggtcgttacctggtgctgtatctgattatcgttgtcggtatggcttacctgttcgttcgtctgccaagctccttcttgccggacgaagaccagggcgtgttcctgagtatggcgcagcttccggcgggcgcgagtcaggaacgtacgcagaaagtcctcgacgagatgactgactactacctgaccaaagagaagaacaacgttgaatcggtgttcgcggttaacggttttggttttgcaggccgcggtcagaacaccggtatcgccttcgtgtcgttaaaagactggagcgaacgcccgggctcagaaaacaaagttgaagcgattaccggccgcgcgatggcccgtttctcgcagattaaagatgcgatggtcttcgcctttaacctgccggcgatcgtcgaactgggtaccgctaccggctttgacttccagctcatcgatcagggtggtttagggcatgagaaattaactcaggcgcgtaaccagctgtttggtatggtcgctcagcatcccgatctgctggttggcgtgcgtcctaacggtctggaagatacgccgcagttcaaaatcgatatcgatcaggaaaaagcgcaggcgctgggtgtttcaattagcgacatcaacaccaccctcggcgcagcgtggggcggcagctacgtcaacgacttcatcgaccgcggtcgcgtgaagaaagtgtacgtcatgtctgaagcgaaataccgtatgctgccagaggatatcggcaactggtatgtacgcggcagcgatggccaaatggtgccgttctccgccttctccacttcccattgggaatatggttcaccacgtctggaacgttacaacggtctgccgtcgatggaaatcctcggtcaggcagcgccgggccgcagtacgggtgaagcgatggcgatgatggaacagctggcaagcaaactgccttcaggcgtcggttacgactggaccggtatgtcctatcaggaacgcctgtcaggcaaccaggccccggcgctgtatgctatctcgcttatcgtcgtcttcctgtgtctggcggcgttgtacgagagctggtcgattccgttctccgtaatgctggtggtacctttgggtgttgttggcgcgctgttagcggcaaccttccgcgggctgactaacgacgtttacttccaggtcggcctgctgacgaccatcggcctgtcggcgaagaacgcgatacttatcgttgaattcgccaaagacctgatggaaaaagaaggcaaaggcctgattgaagcgacgctggaagcggtacgcatgcgtctgcgtccgatcctgatgacctctctggcgtttatcctcggggtaatgccgttggttatcagctccggcgcaggttccggcgcgcagaacgccgtcggtaccggcgtaatgggcgggatggtgaccgcgacggttctggccatcttcttcgtgccggtgttcttcgtggtggttcgtcgccgcttcagtaagaaaactgaagatattgagcataaccatccggttgagcatcattaatcttgcttgagctaagggccgcgtttgcggccctttttctttaagggtatttaaacgcacacattgttattgtttattttacgttctgacatataatatacattgatgaacgttgttctatttttattaagattttcgttaccagctcctctaccagcaggccccattcagaatattcttaattacttacatcatcccggcggccttctcgctgcagatagctgtcaatcagataacttaatgatatataaggcagacacctctgtttctcgcaaacataaatgggagccgtataataaaatctgtttttttaagataaattaaccgtatttattgtaatttttcgtaatagcacggtgaaatgtttttgagactggattatagttaaatcacaggattacaatgtttgagcctggtcttcatcccacaatggtgtttgttagtcgtcgtttaaaccacttacaaggggatgtgttatggacgagtactcgccaaaaagacatgatatcgcgcagcttagatttctctgcgaaaccctgtatcatgactgccttgcaaacctggaagagagcaaccgcggctgggttaacgatcccacctcggcggtgaatcttcaattaaatgaattgatcgagcacatagcaacttacgcgcttaattataaaattaagtacgctgaggataataagctgatttcacagcttgacgaatacctggatgacacttttatgctgttcagtagctatggcataaacacaaacgatctccaaaaatggcgtaaatcaggtaatcggttattccgatgctttgtgaacgccagccgggagaacccggtaagtctttcttgttagaattactacattcaaaaggtgaaatgatgtctggtaagccattaactaaaacagactatttgatgcgtttacgccgctgtcagacaattgatacgctggagcgcgtaattgaaaagaataaatatgaactttccgacaatgaattggcggtattttactcagcggccgaccaccgtcttgctgaattgaccatgaataagctatacgacaaaatcccaacttcagtatggaaatttatccgctagttcattttctgtccttaattcaacggcaccccaacagggattgctcagaatattaaacgtctgagtcccgtattgctgcacatgaaaccggtttcgctttatactgtttcttctttcaccaggagaagatcatgagcgaagagaaaaggaaaatgatcgccggcgaaccttaccttgctggagacgccacgttaaaagcagaccgcctgcatgccaggctggtattgcaccgctacaaccactccgctccggatgagcgcgaatcgcgcgccgccctgcttgctgaactttttggcaaggccaccgacgcgtatatcgaacccactttccgctgcgattacggctataacatcagcctcggcgccaatttttacgcgaactttgactgcgtgatgctcgatgtttgtccgatcagtattggcgataactgtatgctggcgccgggcgttcacatctataccgcgacccatccgctcgatccgacggaacgtaatagcggcatcgagtacggaaaaccggtaacgatcggcaataatgtatggattggcggccgggcggtcatcaaccccggcgtaaccattggcgacaacgcggttattgcatccggcgcagtggtagtgaaagacgtgccggccaatgcggtagttggcggtaatccggcacaaatcatcaagcggttattaaccgaaaaatagtaactgttatgcttttctgtaactgatctgttactttaacgtcggtcttcagcaacataaaatagccctcagactgagccgtagagcctgaaaaaccgggctctacgaagaattcggggactaaaatgacagaaatacaacgcctgctaaccaacaccatcgaggaactgaacgaaaaagaaaagcgcgataatcgcccgcgttttagtatcagttttattcgcaaccacccgtggctctttgtcgccatgtatgctgcttttttggccactctcatcgtcatgctgcgctctgagacgctggttgattccgtgtggctgctgatcgtcctgtttgtcctgttgaacggttttttcttctttgacgtctacccccgctaccgttatgaagatatcgacgtgctcgattttcgcgtctgttataacggtgaatggtataacacccgcttcgtcccagagcagctaattgacggcattctgcaatcgccgcaggtcgcccatgagcagaaagctcaactgcagaaaatgatcgcgaccaaaggtgaactctccttctacgatgttttcactctgacccgcgttgccgcttgattagcctattcaatgtccgcagcgccggtatgaagtgcgccgcggacgtattgccataccccagaaccagaccgctacgcgccttatgtgggttaagataaaagcggcttagcaccgctggcgccatttgatactggcgcgcctgctcgacaatttgcacatcgtccatgtcatcgacggcaaccgttaaatgcaagccgccctctccgccccaaatctcattcgccaccgtgaattcacttgccacagcctcgcgtaactgctgctgacgccgacgatataatcggcgcattgaagccagatggcgcgcataatggccctcttcgatgaacagcgccagcgcgcgttgttccagacgatgaccgcctcgtagcagcgcgccgatcgcgccctgcgccgcctcggccagcgccggcggcatcaccgcgaagcctattcttaatgaaggaaatagcgttttgctgaaggtaccaaggtaaactaccggcgcctgcgccaccatgccgagcatcgcctgaatcggctcgccgctgtagcgaaactcgctatcatagtcatcttccacaatccacgcgtcatgctggcgggcatattccagcaacgccaggcggcggccggcgctcatcaccgccccgctcggatattggtgcgaaggcgaggtaaagataagccgcggcgctacctcgttaacggtatcaggacacatgccatcaccgtcaacaggtatccccttcagctgtagcccggctttaataaacacgcttttcgcgccgaaataaccgggctcttcaacccaggcagtatcccccgcgacgctcagcagatgcgtgcaaaggttaacgccctccagcgcgccttcagtgatcacaatttgccgcgccgtgcagcgtatgcccgggataaagtcagatgacgggcaatcgcctcgcgcagcgccggttcaccggccgcctccccatacccaagaatcgtgctgccgtcctcgcgcagcacccgatcgagcaaacgacgccagatagccagcgggaagtagttcaccgcgggcattccggtagtcaacaacagtgccggggagtcccgtcgacccggcagcggtagcgtgcgcaagcgctcaggcaaaacaaacgttggtggcgccggctcgctttccgccagcgtattgagcgctgccacatacgtcccctgacgactgcggatcagatatccctcaatcgccagctgttccagcgcgctgtttacggtattgcgcgatacgccagcacgctgcgcaatgacgcgcgcgcccggcaaccggctatgactgagtaactcaccctgtaaaatagcctcgcgcagtgcctgatagagcgcacgctgtagcgtcgcgtctccccgttgctgtatcccgcgcgtcagcagggcaaaaaaagcatcgtccggaatattcaacatggctcctcgtggcaccctaaaaagatacgcttatggccctttttatggaaccagctgagagttaatctcaggactcttcccgcaaacaggacttaattgatgacgcaatacaaccaatttaaccaactcgttggcgatgctttacctgactggcagccacgcccgtggccgcagcgccaaaccttgcaaggacagttatgccgcctggaaccacttgccgtcgcacatgcgcaagcgctgttcaacgcctatcgacaggtgcctgatacccgcgcctggacctggcttttgcgtgaaccggaaaacagcgttgccgagttcagtgcctggattgccagcatcagcgatctgaacgatccgcttcacttcgcggtaattgatgaacggagtgggcagccggttggctcgttagcgctgatgcgtattgacgccaaaaacggcgtcgtagaagtcggccatgttcacttttcgccgctgctaagccgcaaagcaatggccaccgaagcacagtggctgctgatgcgttatgtctttgagtcgctcggctaccgccgctatgagtggaaatgcaatagcctgaatgaaccgtcgcgacgcgcggcgctgcgcttaggttttcagttcgaggggcgctttcgacaagcgctggtgattaaaggccacaatcgcgataccgactggttttccattatcgattgcgagtggccacagatagatagcgcaatgcgccagtggctggccgccggtaattttgatgccaacggccagcaataccgctcgctggaaagcttccgcaaaccaacgaattaacgccgttttttacgtccctgcaccgccttaaagcgcgggttacttttgcagataacgtacagccgccctttgcgtttcactatctggcaatccgggtggcgctgtttagcgctacgcaatgagttcagtacctgcatgtttagctccttttggcatcaataaaaccaccaaagcgctggcggaaacgagcggcgctgccttcggtagcatgcgttttctgcttgccggtgtaatacggatgcgatttagacgaaacatcgagggtgacatacggataggtcacgccatccagttcaatctcacgctcggttttaatggtggatcccactttgaagtactcgttcacgctcgtatcgtgaaaaacgacggtacggtagtgcggatgaatattagctttcatggcaaacctcattcaatatgttataacataacaatcaaagtacaccgttaaccgccaaagatcaaccacaggaaattcacggtttcagcgagatccacgcggtggctaagcgggcgatgatttgccccctttcacccggatcgcgatattcgcgatccgggtcttttttccgctttcgcgtatactcagagcaattccccgttaaaataaggacatacccatgacgactcgccatttaatgagtctggttacaggggtgcttattctcgccatcgtgctacccatcgccttaagtatctggctggcaatgcgtcaggcacaggcgcagttttataatgagctcgaccactactcaaaacgcattgtgatgcgcgtagaacaggtcgccgctcaggccaaagaagcattacaagaagccgatgcgcacagcgccagtgcctgttcaccagaacacctgttgaatatgcgccgtattgcctacacccatcgctatgtgcaggaagtactctggttgcgtaattcggtgccgatgtgctcatcgcttgaggatcaccgggtctcggtgacgtttcctcccccgaccacgtgaccgccgacggatacagcacctggcttacctcaatcaacgacctcggcctgcaacatcgtatgaccgccttcggcaacaaaaatcatattgtgatgatcgacccggtgtcgtttattgatgttatcgccagcggtcaggagaagatccacacgatattattcggcactgagcacgatcaggtggtgatcagcagccagcctctcgatcctgccatttggacgcggattaaaaaccttcatagcgagacgctaacgctgaatgacactgtctatcgcgtgcatatcatccctgaactgggtcttggcgtcgccagttggtcgtccacgcagccactggatgcgcgccttcgccagcaactgctgctatggctgccgatagggctctttaccagcctgttgacctcttttttacttctgcgcctgctgcgcagactgcgttcgccgcgttatggcatgctggatgcgctacagtcagatgccatccgggtttactatcagccgatcgtctcgctggaggatggcaaaatcgccggcgccgaagcgcttgcccgctggcagcagccggatggcacttttttatcaccggatatttttatcccgctggccgagcaaaccgggcttatcacccggttgaccgaggatatcgtgcgtaaaatctttgccgacctcggcccctggctgcgccatcatccgcagatgcatatctctattaatctgtcggtggatgacctgcgctcgcccacgttacctaaactgctcaacgagcagctggcgcgctggggaatcaatgcggaacagattcccctagagcttaccgaacgcggctttgtcgatccgcaaaccactctgccggtgattattggctatcgccaggccggccaccggatctcgatcgatgatttcggcaccggctattccagccttagctacctgcaaacgctggatgtcgatacgctgaagatcgacaagtcatttgtcgataccctggaatataagcctctcacgccacatatcattgagatggcgaaggcgctgaatctggcgattgtcgccgaaggagtggaaacgaccgctcagcgcgactggctgcgcgcacatggcgtcaattacgcgcaaggctggctgtactgtaaggcattgccgaaagaggaatttattcagtgggcggaaaataatattaaagggcattagtgcagatgcggcgcgctggcaaccagtcgcgccgccggatttactcgtcaagaatcggcgcaaacccgccgaagatcatgcgcttgccgtcaaagggcaagctatcgctaagcgctttaatccgcgggtcgctcatcattttcgcattggccgcgtccctgatctccttagacgggtactcgatccaactgaagaccacttcctcatccgcctgcgctttaaccgacatgcggaaatccgtcagcttcccttccgggacatcatccgaccaacactccaccacgcgcgtggcgccaaactctttaaacagcggcgccgattttgctgccagttcgcggtatgcctccttattttccgcagggacggcaacgacaaaaccatcaacatacttcatgagtgagtctccgaagtgaacagcgccggcggcatatccgtcggcgtctgagtgataagtttagtcgctgctatcgcgaacggcgatttcaggacgccagttcccggcttttcgccgccgcactgactggccgctgttgacggaaccagggtaaaaacagctggatcaacgggccaatagcaaaggcgtaaaccacggtgccgacccctactttgccgcccagcagccagccaatcagcagcaccgagacttcgatagcagtacggataccgcgcagagaccagccggtccgcgcgtgcaatccggtcatcaggccatcgcgcggtccggggccaaaaccggcgccgatgtacatcccggtcgctaccgcattcatcaccaccgcgccggcaagcagcaggctacgcgcgggcagcgattccagcggcggaagtaccgcgagcgtagcatcggctgcaaggcccagtacgatgacattgctaatggtgccgagacccggcatctggcgcagcgggatccacagcagcagcactgcggcgccggtcgcaataatcaccgtaccgaaactgatattaagctgtttcgctacccccagatgaaacacatcccacggatcggctccgagattggcatggacgaataacgccgtcgacacaccgtagagaaccagaccaatataaagttgtagcaaacgacggaccataaacacctcagtatgtattgcgaacaaccccatcatcagcaaaaatggatcgataattaatggccagttttagaaaagtggatcgctatgtcagtacgtcgttttggaacacaatcgctggtacgcctgctcggcaactggcaggccccttcctcgcgcacgccgctgtggcggcagctggcggaagcgttgcgtctattgatcctagatggacggctggcgctggaaacccgtttgcccggggaacgagaactggcgacggcgctaaatgttagccgcaccacgatcgccagcgccttgggtttattacgcgaagaaggctatctgcaaagtcgccagggaagtggttcacgcattgcgctacctgccggccctctgctcccggagagcagacgctttcggcgccatcggtcaatctcgccaccgccgccctcagcgccggaccggagattcatcaagcctacagccacgcgctgacgctgatgccgcagtatttgtcctataccgggtacgatcagcaggggttagtcgatttgcgtgcaatcattgcccgccgctatagcgaacgcggcctgccgacgcaggcggatgaagtgatgattgtgaatggcgcgctgagcggatttgccctggtactgcgtctgttaaccgggccaggcgatcgggtggtagttgacgcgccctcttacccgatggcgattaacgctattcgcggcgcctcctgccgaccgataggcgtctctttaccggaaaagggctgggactgcgacggcctggcggcgaccattgcgcaaacctcgccgcggctggcctttatgatgccggattttcataatcccaccggccgctgcatggatagcgagacccggcagcgcgtcgccgatctggccgccagcacgcgaacgacgctggtcgctgacgaaacgatggtcgatttatggtacaacgccccaccgccgccgccgctggcggctttcaaccctgaagcgccgataatcactattggttccgcgggtaaaacgttctggggtggactgagggttggctggatccgcgcgccagcgtcgactatcgcctcgctcatccaggcacgggatacgctcgatctcggctcgccgctgctggagcaactggcttgctgttggctactggagaacgaacaaacactgttgccgcaacgtcggtcaatgctggccgcacgtcgtgatatgtgcgcagctctgatgacggaatattttccccactggcgcttttgcgtcccagagggtggactatcgttttgggtcgagctgccggagatgttggcaacgcagttctcggtgcgcgcagagaatgccggaattcacatcggtaccggtacgcgattcggtctggaaggcgccttcgaccgttatttacgtttgcctttcacgctgccggatacggaattgcgcaacgccttcagcattttacaaccattgtggcagtcccttacgcaacagaaagaaatgacgcgaacacgtaaaataatataataaaatatcgacgggccaggatcagcccgtcaaaaaccaccatccatgatgaatatgagatgttttataaaattgcagtgccatcttgcccacaccccatgtcattacgatgacagcggtgtagtaatttcattaatgctggcgcggaataggaaaaccttttagcgaaataataaagccatcgtcatcttttttaatttttgcgccggtttcacaccaatcggaagcaatgcgaaaaaactcatcactaccgatattccagttcaggcgcacgtgtttaacgtacccggaacgcagcaggtcacacgcttcactgtaactgctggctgtagagaattgttgtttcattttttcttcttcagaagtttacgtaatgctttgatttctttaggggttaacggcgacgcttcctcttcggtatgttggttatcaatatcctcatgcgaaacccccgcctcgtctgctgaatcaatggccgccagcgccaattgcagcagcttctccgttgccgtgcctaaattctcgttattgacttccgcataatgacgcagtttatcttttaactctgcgtcaattttcacattcagaactactgtggtcatgatcacgcttcccgtgcaataaaatcatcataattaatacacgaagttaacatcttgatccagagatattatttatccttaataatatctggtaattccagagaataatttgcccattatatatgacatgaaaatgacattagtatgtcattattatttcatatttatgacaatgaaaggttaaggtataaaaaagagtcgttttagtaacgtaaaacaataaatgaagtgaagctgcctataatagtagcagagaataaaagcacaacaaatgaggggaaattaaatcagggccgccagaattgggtgggggccctgccagctacatcccggcacacacgtcgtctgctctggctgcttccttccggacctgacctggtaaacagagtagcgttgcgggagaaccaacagagccccattgagagcgttgataaccaacgcgctggcgcattatccctatagcactcctgaattgcaagccactcgcgtccagctgctggtttattatgcaaaacgtcggatttcccggcaaatagtgcctttacccgaccgaacgccccagcaatgagagagattgcgagccccatcgcggcacagtttaccgcaacccgccatactaatctgtcctgtgtcttttcaacgtgttgtcgctacggtaatcgcatgactaaatcgccacgccccaccaccaccttgcccatgcccgccattgatggcgtcaccgtcccctttcacggcatgaattttctacgccccgagctgctgctggatttcgtcagcgtcagtcccgcgccgttgttatcggtgacccccgttgccctgctcttttccacggtgggcgtattgcaacacgtcgagctgcgtaagctgcccgttgaggtcaaaggccgggtggtttatcccatttcatcgctcaaatacccgacgctgcgcggcaaactgattatcaatgcgcaatcgcagcggctgaagtttcttgaaaacctgattgccaacagcccgcatgacaatattcacggtatgcagatcctcgggctggcgctggaattcaccgtcctttgacggctgtacagtacgggggcaagcgcttattctgagcttttctcgcgtgaaggagtgatgatggaggacgcccacgacagctttccccagcgggtctggcagatagtcgcctcaattccggaagggtatgtcaccacctacggcgatgtcgctctgttggcgggttcgccgcgcgcggcgcgtcaggtgggcggcgtgttaaagcgactaccggaaggctcaacgctgccatggcaccgggtggtgaatcgccacggcgatatttcgctgaccggccccgacctgcagcgccagcgtcaggcgctgctggcggaaggcgtccaggtctccggcagcggtcatatcgacctgcaacactatcgctgggtttattaagggcaaaaaaatgccctgaacaggggcatggagacatttattgcgccatcggcgccatatcgttagccaccggcactggcgcatgctgcaccggcaccagcaccagatcggcacgattaccgccctgggttaccacggtctgcacggtatcggtgataaacatcagctggccatttacggtaatcgccgaactcagcaggatccgcgcgttcggtttgatatccgcctggttgtaaggcagcacaaaattgaacggcgcctgcttaccttcagtacggaccgctttttgtgacaatacacgcgctggcgcatcggcaagcgacgcatcggacagcgtcacggtcagtaccgcatccggcggtaacgctacgcgttggcgaatattgatagtcccggaaacattaggctgttgctgcgaggagctcagtgaggcaatgccgtaaggatcgggtgccgtcgtctgatgagcggcgttactgttcgggttattcgcacaggcggataaggccgcagcaacggcgatagcacttaacatataggcaaatttcattatgttctccttttcatccctttagtcacaggagtacgtcctgccatcacgatggctaagacattagtatcgtgaataagtgtggcacagatctcagaataattcccggaaagggcatttattcagattattacacccatcggaccacttgagattccaggttatacttgcccacaatatgcgctgcgtcagcgccgctatcattaattgagggtaactatgagtcaggctctaaccaatctgctggcattattaaatctggaaaaaattgaagaagggctgtttcgcgggcagagcgaagatctcggcttacgtcaggtcttcggcggccaggtggtcggtcaggcgctgtatgccgctaaagaaaccgtgcctgaggaacgcctgattcactcctttcatagctacttcctgcgtcctggcgatagccaaaaacccatcgtttacgatgttgaagtgctgcgcgacggcaatagcttcagcgctcgccgggtggcggccattcagcacggtaaacccatcttttacatgaccgcctcgttccaggccccggaaccgggctacgaacatcaaaaagcaatgccgttagccccttcaccggaaggcctgccctctgaaaccgatatcgcccgtaaactggcgcatctgctgccgccgcaggcgaaagagaagttcctcagcgacaaaccgctggaaattcgcccggtggagttccataacccgctgaaaggccacgttgccgaacccacccgccaggtatggatccgcgccaacggcgtggtgccggatgatattcgcgtccaccaatcgctgctgggctacgcgtctgattttaatttcctgccggtagcgctacagccgcacggcgtcggcttccttgagcagggtatgcaggtcgccaccatcgaccactcaatgtggttccaccgcccgtttaacatcaacgaatggctgctatacagcgtcgaaagcacttccgcctccagcgcccgtggctttgttcgcggcgaattctatacccaggacggtattctggtcgcctcgacggtgcaggaaggcgtcatgcgtaaccgcaatagttaaccccctacgggcccacggcgggcccgcttgcccctaacggccaagcagttcgcaagcatcggcaataaaatcccccaaaagtccgttgcgactctgccgccgccagcacagcgtgagcgttgtcacggcaaaggtttcttccagcagacaataactgacttccgacaccaacatggcgctttgcgtctcgggcaccaacgtcacgcccattcccatcgatacctggcctatcgccgtggagacatcacgcgtgtactgaatcttacggggcgtaaaacccgcctgccgacaggcgctgattgctgaccaacccagtccgacgccgcaaggatcctgctgaataaaaaacgtctcttccgccagcgccgcgagaggaatagcccgccggctggcgagcggatgatggcgaggcaccaccgccaccagcggccgggtcgcaatatccagcgactccagttcatcatattgcgcccctggcgaacgaacaaacgccaggtcgaccgtttcgcttaataacccggttatcaggtcgttaacgttatgctcttcaatcagcagatcggcttcgggtttccgttgacgataatttcctattaacacgctcagcgccgggtcgaaaatagcggagccaacgtagccaattttcaactgccctttgcgtccctgccgcaagctgcgcgcattctcgcgaaatttatcgcagtggccgaggatcatccgcgcctcggccagcaaaaattgcccttcggcggtcagcgcaacgttgcgtcgatcgcgggtaaatagccgcaattccagcgcgttctcaaaacttttaatctgctgcgtcagcgccggttgcgtgatatgcagacgctgcgccgcccgaccaaagtgcaactcttccgccagaaccgtaaatgcctgtagctgtcgataatccatcacgccctcccgaaaacactgataataatctcttattaaaatgaggggaaatgtgattggactcttatcggtatctggtgagaatgaatagccattgccagaaacctgaaggaagtacgatgtctgaacaacaaatgaaagtaaccgatctgcgttctgctttggcggtattaagccagtacgatgatgaacttatctacaccgacgaacccgttgaccccattgccgagctctccggggtgtaccgctatgtcggcgcccacggaaccgtacagcgcccgacccgcgttggcccggcgatgatctttaataaggtcaaaggctacgatgatgtcagagtgcttattggcctgctgtgttcacgccagcgcgtcgcccgtctgtttggcaccacgccggaaaatctggcgtttatgctcaaagactccgtggcgaatcctatcgccccaatcaccatccctcgtgaccaggcggcctgccaggaggtggtacatctggcaagcgatcctgatttcgatattctcaaaattttgcctgcgccgaccaacaccccggaagacgcgggtccctactttacccttggcatgtgctatgccgcggatccggaaaccggcgatcatgatgtcaccatccaccgcctgtgcgtacagagcaaagacgaaatctcgatgtatttcgtaccgggacgtcatctcgatactttccggcaaaaagccgaggcggccgggaaagcgttgcctatctcaattagcatcggcgtggatccggcgattgaaattggcgcctgctttgagccgccgaccacccctctcgggtttgatgaactctccgtcgccggcgctctacgtaatcaggccgtcgagctcagcgaatgcgtgagcgtcaacgcccgcgccatcgccaacgccgaaatcgttattgaaggtgaactactgccgggcgtgcgggtacgcgaagatcagaataccaacagcgggaaagccatgccggagttccccggttacaccggtagcgctcaggcggaagtgccggtgatcaaagtcaaagcaattacccaccgccgtcacccgattctgcaaacctgtatcgggccgagcgatgaacataccaatcttgccgggatcccgaccgaagccagcattctgcaaatggtagagcgcgcgcttccaggctttgtgcaaaacgtccactgtccttcgccaggtaccggtaaatatctcgccgtgctgcaggtgaagaaacgcacccccagcgatgagggccgtcagcgtcaggccgcgctactggcgttttccgccttctcggagctaaagcacgtaatgctggtcgatgaagacgtcgacgttttcgacatcaacgacgtaatgtgggcgatgaccacccgctatcagggcgatgtcagcaccgtgtttatccccggcgtgcgctgccatccgctggatccgtcatccgacccggccttcagcccatcgattcgcgatagcggtattgcctgcaaaaccattttcgactgcaccgtcccgtggaatatgaaagcccacttccagcgtagccagtttatggaggtggatgttgaccgctttatccctggcttcagtaagaaataaattccctgcaaagaaaaagcctcccatgcgggaggctttgacgcttatggagattgcacaatatatcaggcgttgtaggcgttttcgccgtggctgttgacgtccagcccttcgcgctcctgctcttccggaacccgcaggccgacggtcatcgccgccactttgaagccgatccaggcgacgacggcggaccagactacggtaatgccgatactttccagctgtaccagcaactgatgccccatcgtgacgccttccgcatagccgacgccgccaagggtagtggaagcgaagatgccagtcaggatacaaccgatgatgccgcacacgccgtgaacgccaaatacatcgcatgggtcatcgacgcgcagccagcgcttcagcaccgtgacgccccacagcccggccagtccggcgatgatgccgataatcagcgaaccgccaacgccaacataaccgcacgccggagtaatgccgaccagaccggcaatcgcgccggagcaggcgcccagcagcgagggtttgccgcgggtggcccattcgccgaaggtccaggccagaatagcgccagcggtcgccacgacggtatttacgaaggccagtgcggcaatttcgttggccgcgcttgcggaaccggcgttaaagccgaaccagccgacatacagaatcgccgtaccggtgaagaccatcggcaggttatgcggtttaaacgcttctttgccaaagcccacgcgtttgcccatcatatacgcgcccaccagccccgctaccgcggcgttgatgtgtacgaccgtaccaccggcgaagtccagcgcgccatgggtcgccagcaggccgccgccccacaccatatgcgcaatcggcacgtaggagagcgtgagccaaaccaccacgaaaatcagtaccgcggagaaacgaatacgttccgccagcgcgccgacgatcaagccaacggtgatacaggcgaaagagccctggaaagcgacgtggatatattgatagaacgagcccatcaacgctttcagttcaatatttttcagcatgacccagtcgaagctgccgaagaagctaccgccgctaccgaaggcaagcgtatagccatagataacccacagcacgcaaaccaggccaaaagtcacaatgacctgagtcagcattgagagcacgtttttaccgcgaatcaggccgccgtagaacaacgcaatgccggggattgtcataaacagcaccagcgcggtgcaaatcatcataaaggcgttgtcggctttatccgccaccgccggttcggccgccagcgccagtcccggaagcagcgccagcgctcccagagccgttttcatcgtcgttctcatcatctcttcatccccatcgctgtgtggtcaggcaattacagtgccgcttcgtcggattcgccggtacgaatacgaatcacgcgctgcagttcggcgacaaaaattttgccgtcgccaatttttccggtccaggcggccttgcctatcacctcgacaacctcatccagctgatcgtcggcaatcgcaatatcaatttttacttttggcaggaaattgacgctgtattcggcgccgcgatagagctcggcgtggcctttctggcggccgaagcctttcacttccgtgaccgtcaggccctgaatgccgatggaggacaacgcttcgcgaacgtcttccagtttgaatggtttgattaccacggtaaccagcttcataaatccctccagtcagtatttgatagtggccgcagctaacacaggagataaagcaagggatatgccaaaaatgaaaacgggccgtgaatcggcccgtttatggagaaaaaaacgcgaggatgttactggcgagacggcaaatgaccgctaatgcgcaaaaatgcaccaatacggtgcgcgttcagtgagcaagttgcaccacttcacgtcaaccctgcaccaatgcctgctgatggtgcatcaggcactcagcgactcctcttcaacgctggcggctagttcttcgccagccagctgtagctggtacatctgccagtaacggcccttcgccgccagcaattgctgatggttcccgcgctcgacggcctggccacggtgcagcaccaggatcgtatccgcttcgacgatagtcgacagacggtgggcgataactaccagcgtggtgtgctcgcgcactttcgccagcgcctgctggatagcctgctcggtaccggaatcgatgttagctgtcgcttcatcgagaatcagcacctgcggcgtctcgaccagcacacgggccagcgccaacagctgtttctgccccaccgacaggttgttgccctgctcgcccagttgggtataaatcccgtcgctcatttcacgggcaaggtcagcgagctgtaccgcctccagcgcttcccagacctgctgctcgctgatatcgcgtcccagcgtcacgttggcatagaaggtatcggctaataccaccggatcctgttgcaccatcgcgacgccccgacgtaaagcgctgtggcttaacgacgacagagggcggccatcaagacgaatttcgcctttagtcaacgggtagtagcccatcatcaggcttgccagcgtgctcttgccgctaccggtatggccaaccagcgccacaaaaccgcgcgaaggaatatccagattgatatcctgcagcaccagccgatcgtcgcgataggcaaaagagactttatcaatcgccaccgcgccgctgcgtaaaggcttgctatcgttaccccagctttggcgtggacgatccatcagctcaaacacgcgctcgcccgccaccaccgcttgctgcagcatcgactgctgggtggtaagttcgatcagcggttcgttaagccgcccgagatagctaataaaggcatataacacaccgacttcgatacttccggaagcgctaaaaccaaacagcatcagcaggccgcagaggatcagcgatgaaaacaggcttaacagcggtcgcagcaggaaaccatccagacgcaatgtctgcatacgcgccagatagtggccatagctggcttcacgcatccgctcgccgaatcgcgcctgctgccggaattgctgaatgacgcccatgccgttgatcacttcattgaagccatcattgatatcggcaagccacgcacgcatgcgacgcacgatcggcgtactgtaacgctgatagatagccatcacgatcagcaccgccgggaagatagccaccgccaccagcgccattcgccagtcgagactgaacatcgccaccagcatcgcgccaatcagcgccgcgctgcgcagcaccgttgccacgaccgtcacgtacaggtcgcgaatcacttcggtgtcgttggtgacgcgcgaaatcagttggccgaccggttgcgtatcgaactcgctgagcggttggcgcaacgcggcgtccatcacatcactgcgcaactgctgcaccacgccgaccgccgcccggttaaacagcagcgcctggttataatgcagcgtagcggcaaggatctgcaggcagatataggccgccgccaggccgctgaccagcttcaccggcagcgactgcttcgccaccatgttatcaatgaaatagcttatcagcagcgggccgctgacttccgcagccgccgctatccacatcatgataaccgcaatgatgagcggcttacgccacggcgaaccgtaggccagcagacgtttcagggtcggccagagatgagcgaaattacgcatctgtcgcctcctcatcctgtggcgcatcgtcgagcgccgcttccagttgctgatagcgatacatatcgcgataccatcccgactgggcggcaagctgctcatggcggccgcgctgggcaatgtggccgtgttgcagaaccaaaatttcactggcttcggttaatgctgagaggcggtgggcgctgataatcaccgtccgcccttcccccactgccgcaggttatgcaaaatatcatgctccgtccgcccatcaaccgccgacagcgcatcatcgaggatcagaatttccgcctccaacagcagcgcgcgggcaatggaaatacgctgtttctgaccgccagagagcatgacgccgcgctcgccgacttccgtttcatagccctgtggcaggcgcagaatatcatcatgaacgctggccagccgcgcgacatgttcgatttgttcccgggtcgcgtccggtttacccaacgcaatgttattggccacggtatcggagaacaggaatggggtttgattgactaccgccagccgcccacgccagctatcaagctgcagacgagccagcggaatatcatggaaacggatatccccctcggtgacatcaaaatggcgctgaataagggaaagaatggtgctttttccggctcccgtcgggccgcagataccgagcatctgccccggctgcagggtgaagttaaccttctccagcgacggtttcgtcgcctgcggatagataaattcacgcaccgccacgttaagcgaaccgcgcccctcgggcaccgtttcgctaccatcgttgaccaccggcgcttcttccagcatcgaacgaatacgtccgtaggcggcgctaccgcgttcaacgatgttaaacatccatgccagcgccagcattggccaaatcatcaggccgagatacatgacaaaactggttaactgaccaagggtcagctcgccctgcaacaccagccagctgccgccgccgattgccagcaggttagcggcgccgatagcaatataaattgtcgggtcgaaacgggcatcgatacgcgcgacccgcatgttcttcgccccggtatccgccgcatcggcggcaaactgcgccgactgtcgatcctcaaggccgaacgctttaatcatccgtatgctggtcaggctttcctgtgtgcgatcgttgaggctggaaaaagccgcctgcgccacgcggaaacgctcatggagggcatcgccattacgcttgatagccagcgccataaacggcatcggcaccagcgccagcagcgttaactgccagctgatttgcgtcgacatcacaatcagtaccgcacagcccatcaccaatgaatccaccagcgtcaggacgccctcgccggcggcgaagacaacccggtcaacatcgttggtcgcgcgggcgataagatcgccggtacggtgacgcagataaaaggccggatgctggcggctgagctgacggtaaaagtcttcacgcagttcaacggccagttgataagaggcgccgaagagcagcacgcgccagacatagcgcagtagataaatcatcaccgcgataactactagcgcgccgatccacatccacacctgctctgcggtgtaatgttctttagtcacgccatcgaccacaatccccacaactttcggcgggattagctggagtacggcaataacggcaagcagagcgacggcgccgagatagcggcgccactcccggcgaaagtaccagctaagttgagcaaataatcgcaaacggtaaaatcctgaatgtataattcgtggcggcaaaaagccgttaatcaataggcaaggccgtggtgtattttatctgttccatggcaaaactcgaagtgacatccgacagccccggcacgctgttcaccagacgtttataaaagtcgtcatagcgcttcatatccgcgacctgcacccgtagcaggtaatcatactcgccggccatacgccagaaaccaagcacttccgccatttgcgacacctcgctgacaaagcggcagtaccagtcactgctgtgatgctgggtttttatcaagacaaaggcggttaacccgagccccagcttttccgcatccaggatggccacgcgctcgcgcaggatgccttcatcctcgaggcgcttgagccgtttccagcagggcgtggtggtcagattaacggcatccgccagcgcctgcaaagagagggtgcagtcagtttgcagcaatgagagcagcttacggtcaattttatctagcataaggccaccagggagaataatttactcccgtaattgtaattgaaaggccaaatagcaacaatttttcccgcacaatccgctaagctgggcacaaaatgacaaacaggaatccgagatgaacagcgcctgggtaaaacatgctattagtgaaattaacgccgactatcagcgttccgccgatacacacctgattcgtctggcgctgccaggttttccagggatccctatttatctgaaggatgaaagtacgcatccaaccggtagcctcaagcaccgactggcgcgttcgctgtttctctacggactgtgcaacggatggatcaaagaaggcaccacgatcatcgaatcgtcttcgggttcgacggcggtctcagaagcctattttgctcgcctgctgggcctgccgtttattgccgtgatgccctcctggacggcaaagcgtaaaatcgaacagattcagttttatggcggacggtgtcatttcgtcgacaacgcctgcgaaatctacgctgcttctgaaatgctggcgcgcgagttgaatggccactatatggatcagttcaccttcgctgagcgcgccaccgactggcgcggtaataacaatatcgccgacagcattttccgccagatgactcacgagccttacccgcagccgtcgtggatcgtcatgagcgccggtaccggcggtacttctgcgaccatcggccgctatattcgctgccagggctacgagacgcaactgatggtcgtcgacccgcagaattcggtatttctggattactggcaaagccgcgacgccagcctgcgcagcccggtcggcagcaagatcgaagggattggccgtccgcgcgtcgagccatcgtttattcccgacgtcgtcgatgagatgctgcgcgttccggatgccgccagcgtcgctaccgccctgtggctggaaacgcagcttggaagaaaagtcggcgcctccactggcaccaatatgtggggcgtgctgcagctggccgcacggatgcgcgatgaaggacgcaagggttccatcgtcaccctcttgtgcgacagcggcgaacgttacctcgaaagctattacaacccgcagtgggtcgcggcgaatatcggcgatattaccccgtggcagacgcagattatgcaactgagcggcatataataaaaaaagccggatagaacgctatccggcttgctggtagggtctctctattcggggaataaggaagatcaggattatccagccaatgtgttaaaaaatgggaaacagcctgatgacggcagtctccgatgatcggtagatgcggcagttcagctttgagctgcggcatcgcgttacccataatgaagcctcgacctacgctaccaagcatctcgcgatcgttcattgcatcgccgaaggccatacagtcctgcaaagtgaaacctaagtgctggctcagcaccgccagcgcggctcctttattacagccgaccggcagtacctccagacaatccatcgccgagaaacaaagaaacgcgcgatcgcctagcacttcatttagctggatccgcagacggcgcagatcgtcatgatcgccgcagaaacagatcttggtgacgtggtgcgccggcatccgtttcggatcgcgcagttgataatgaaagccgctgaaggcgtgagctcgaagcagttccggccttgcctggccggtaaaccagcccccatcattgaaaacgtgcatactcgcctgagtatcccacacgctgtgcagcacctcttccgccacttccggattcagatcctggcgatacagctcttcaccttccagtgaatggatgcgcgtgccgttaccggtaatcagaaaagcatcaagggaaaactcgccgatcacatggtgcatttccagagcatggcgaccggtggcaaaggtcagggcgatatcgcgttcacgcagccgtctcagcgccgtcagagtctgttctccgagacgatggtccggcatcagcagggtgccgtccatatcaaatgccgctaattttgccatggtattttccccgatgtgtgatgggtttcgcttgtgttgcagtatcgcctgagatatacggaagtaatagtgaatagatattttttattgttccgggttttcggcaaatgagattattaaaccgattaaatcagtaccagcgcctttggcaaccgtcgtccggcgcaccacagcaggtgactgttggcgagctggctgaacgctgcttttgtagcgagcgccatatccgaacactgctgcgccagtctcaggaggcaggttggttaagctggcaggccagctccgggcgcggcaagcgcggaatgctctgtttttacaaaaccccggaaagcctgcgtaacgaaatgatggaacaggcgctgaataagggtcagcaacaaaacgcgctggagctggcgcagctggcgccggttgagctaaaagcgctgttgcaccccttcctcggcggccagtggcaaaacaataccccgaccctgcgtattccttactatcgtcccctggaaccgctgcgccccggttttcttcccggcgtgcggaacaacatttggccgggcagatctattccggcctgacgcgtttcgacgatagcgacaatacgccggtgggcgatctggcacaccactggcaggtatcacccgatgggctgcgctggcacttttatatccgctctaccctgtgttggcataacggcgataccgtagaatcctcacagctgcggcaaagactattgttgctactcgaactgccggctctccgcaccctctttgccagcatcagccgtatcgatgtcacccacgcccaatgtttgacgattacgctgcatcgcccggactactggctaccgttccgtttagccagctattgcagcgtgctggcgcatcctgacgatccggcgatcggtagcggtccgttccgaataaagctttttggcccggatctggttcggctggagaaccatccccgctaccatttacagcatccgctgatccaggcggtagaatactggatcacgccgcaactattcgaaagcgatctcggcaccagctgtcgccatccggtacagatcaccatcggcgatcccgaagagctcaataatttgcgccaggtgagcaacagcatcagcctcggcttctgctatttgaccctgcgtcagagtccacgtctcagtaaagcgcaggcccagcggctaatttcgattatccaccgctcgtcgttgctggaaacgctaccgcttgacgaagacctgattacgccgagccatgaggtgctaccgggctggtccattcctcaaggcccggaaaaccatgaggtgccgttgccgccccaactcaccctgctctatcatttgccggtcgaattacacacgatggctgagcaactgaaactgcgcctcgccactctcggctgcgaactgacgctcatttttcacgacgccaaaaattgggacggctgccggtatctggcgcaggccgatatgatgatgggcgaccgcctgattggcgaagcgccggaatatacccttgaacagtggctgcgctgcgatacgctatggccccatttgctgaccggggcacaatatgcgcacctgcaggcaacgttagatgccgtgcaggcgcagcccgaagcgcgtagccgcaatgatgccctgcgcaacgtcttcaacacgctgatggatgacgccatcttgacgccgttattcaaatataattaccgcatcagcgcgccgccgggggttaacggcctgcgccttaatgccagagggtggttcgactttgccagcgcctggctaccggcatcatcggcgtgagagagctggtcgccgcgagcgtctgacggtaccatattgctctcatttatttagtcaggaatagctatgaaacgcgccgtagttgtcttcagcggaggacaagactcaacaacctgcctggtgcaggcactggaacagtatgatgaagtgcattgcgtcacttttgattatggccaacgccaccgcgccgagattgacgtggctcgcgagctggcactaaaactgggcgcggtggcgcataaagtgctggacgttactctgcttaacgaactggcggtgagcagcctgacgcgcgatagcattccggtaccggattacgagccggatgccgatggtattccgaataccttcgttccaggtcgcaatattctgtttttaaccctgacggcgatctacgcctatcaggttaaggccgaagcgattattaccggcgtttgcgagaccgacttctccggttacccggactgccgcgacgaatttgttaaagcgctgcaccacgcggtgagtcttggaatggcgaaagacattcgctttgaaacgccgctgatgtggctcaacaaagccgagacctgggcgctggccgattattggggccagttggatctggttcgccgcgaaacgctcacctgctataacggcatcaagggcgacggctgcggccagtgtgcggcctgcaacctgcgcgccaacggcttaaatcagtatctgggcgataaggccggcgtgatggcgcaaatgaagcaaaaaaccgggctgggccaggggcacgaagcttaagttcaacgtccccggtggcgcttcgcttaccggggctacaggttcaccgctctccgcggtcagactgtttctagcgtaaattcatctggtcgagcttttcgcgcaactccccttccagcggctgcgccttctgcgttttcaaatcaatgcagacaaaggtaatcagcgcatcggccaccacttcaccgttagggttaagggtcacaacctgactaagggtgccgcttttgccgttcaactgctcgagcttactggacacggtaagcacatccccgagtaccgccgggcgacgataattgatattgatgttgaccaccacgaaagcgatgttatggctggtcatccagtgaaacgccggactactctccagcccatcccagcgcgcctcttcgagaaactccagataacgagcattgttaacgtgctggtacacgtccagatgataaccgcgaactttaatttgagtctgcatagcgcacatgccttactattattgttgttaatcaggtaagaggtcacaccagatggcgtaacctctttagcatggcaaagatttgccactgtgcaaagcagcgggtgaaattagagcgtcagatgtgacagatttctctctaccagcgaactccccatgccgggaacctgtttaagatcgtcgagagtcttaaacggcccgtactcttcgcggtagctgacgattgcctgcgctttcttgagcccaacgccgttcatggcctgtgccagcgcttccgcgctggctgtattaatgctgacccgcgcgccgacgttatccgtcttttttgcctcctccggcattttcgtctgcggcgcctgaatagcctcttttgccgataccgccttgccgctcgccgatgccgccagcgccccctgagaacccgccgcgcaagccagcaacacggcgacaataaccattttcattcctctgttcatgctgttatctccttgtttgtagacagcaaggtcacgatagcggctgcaaaaaaggagtacaaaaggcagattgcggaaatggaaaaggccgcgaaagcggcctttgtgtattgcatcacgttacctcgttttgcgaggcagcgcgaaattattgctgctggtcgacgaggtcgccgagcttgattttagcttctttacgcagattactcatcagcgcttcgaatgcgatttgcgcattattctgggtaataccctgcaccatcgctttcttctgctcttctggcatagaacccgctttcacttcatccagcgccagcaacactacgttgcctttggcatcgctgcccacgccgtagctcgctttatctttctgcggaagaggcagagaaaaggccgcctggctcaatggatcctggccggtacgggacagcgtctgtgcggcgccgaaactcagccctgcggctttcatcgcgtcatcgcctttacccgctttcaggtcggccaacagtttgtcggcatccagtttcgcctgctgttccgctttattgcgcttcacgatatcagtcacctgcgctttcacttccgccagcggcttaacgctttccgctttgtgctcgctaatgcgcagaacaaaggcgcgatcgccgtcaacggtaatgatatcggagttactacccggcgcgccgttttcacccaccagaccgccattaaagatagcatcggcaaccggcttgaagttcagctcctccggcaggttgtcacggccgaaccagccggtctcaaccactttcaggccggcaacctgcgccgcgcccgccagggattcgttatcattgctggctgcatcgctaaccttctgctgtagcgcgtaatacgcgtccagcgctttttcctgtttcactttagccgcaatatcgttacgcacgtcggccagtggttttacctgcgccggctgaacatcatcaaggcgcgccaccaggaagcctacggaagatttgatcactccggaaagctgacctttgtctttcagggcggcatctttgagctcaggcacggtagaggcctcttccatccagcccatatcgccgccgttacgcgcagagatgatgtcggtagatttctcttttgccagcgtggcgaaatcggcgcctttttgcagttcggcgagcaccgctttcgcatcagcttcagttttagtctgaatcacgctgtagcgattacgctgcggctgagtgaactgatctttatgctggtcataccatgactggatttcttcgtcagaggcgttttcctgcatgctggcggcatccatcttgatgtagctcacgcggaactgctctggcgccataaaacgggcctggttctgctgccagaaggcgttaatctcttcatcactaacggtctgtttcgccgccagcgtgttaacgtcgatagtcgcttcacgaaccacgcgctgttgggataccagcgccgccagttggtcggactcgccctgcagcatgaaatcggtatctgcaaccgcattgatcagctgttgcgtcgtcagttggttacgcagcgcttgcgcgtattgatcggtggtcatacccatttgattcacgatgccgctgaaccgttcgttatcaaatttgccgttcgactggaaggcctgggtctggaagatggcctgtttcacctggtcgtcgctgatgctaaggcccagctcacgggcatactgatccagcagcgattcatcgatcaggcggttcagcacctgctgacgcatggtcttcatgtagttttcattggctgccagttcggagaactgatcgcctaactgctgctgcatgcggttacgctcgctggcaacggcgttttcaaactgcgcgcggccaatctcctgaccattcacttttgcggcatagttgttgccgccgccaatcaggtaaccactcaccccggtcaaaatgaacgagacgataatgataccgaaaataatcttgagcacgacgctgttggcggccgtgcgtaggttgtccatcatggtgtaacaacgctccgctgtagatgactttagctcgcgcagcatagcacgtgatggctgccgcgcgtgaggacgtattttgacaagaaaacggggcaattgtcagcccacaagtgcgcataaacacacataaagtcgcgttctggacaaataaaaaaggcacatctcgcgatgcgcccttgtacttcgtcacattccctgacgggagtgccgattagtttaccgcgtctttcagcgctttacctgcacggaagcccggtactttagcggcagcaatggtaatttctttacctgtttgtgggttgcgaccagtacgggcagcacgctctttaacagcaaaagtaccgaaccctaccagcgcaacatcatccccagcttgcagagattcagtaacagaagcgatcaaagcatctaacgcacgtccagctgcagctttagaaatgtccgcacccgcagcaattttgtcaatcagttgagatttattcactgttctcttcctctctttataatttatatcgcaccagaatccttcatggcgcgaccgcgcagcagttatatcaggactgtcatgcccttacaacacagttgtcgatgacccctgccagcgatctaagttagctacacaaaaaaaggctggcaagtacgaatttactcaccagccccacttttcttaacgctatttgcgcgatatcactattttgcgcttacaacctgcatgccaaacggttcattttgcagagcaagtgtcagaacttcctcgattcgctgtaccgggtggatatccaaatcggcgataacgttttccggaatttcttcaaggtcacgcttgttttcgtaaggaatcagaacagtcttaatgcctccacgatgcgcagccagcagcttttccttcaggccgccgattggcagcacctgaccacgcagagtgatttcccctgtcatcgccacatcggcgcgtaccgggttaccggtcaggcaggaaaccaacgcggtgcacatcgccgtaccggcgctcgggccatctttcggtgtagccccttccggtacgtgcacgtgaatatcgcgtttttcgtaaaagtccggattgataccgagcttctcagcacgcgcgcgtaccacggtcagcgcagcctgaatcgactcctgcatgacttcgccaagtgaaccggtgtaggtcaacttgcctttacccggaacgcaggcggtttcgatggtcagcaaatcgccgcccacttccgtccacgccagaccggtgacctgacctacgcggttttcgctatccgcacggccgtagtcaaagcgctgcacgccaagataatcatgcaggttttcaccattaatctcgatgtgtttcagcgacttatcaagcaacagctgtttaacggctttacggcacagcttggagatttcacgctccaggctacgaacgcccgcttcacgggtgtagtaacgaataatgccgataatggcgctatcgtcgaccgtcagctcgccttttttcagcgcgttgcgttcgatctgcttcggcagcaggtgacgcttagcaatgttcagtttttcatcttcggtataaccggagagacgaatgacttccatacggtccagcagcggcgccggaatattcatggagttggaagtcgccacgaacatgacgtcgctgagatcgtagtccacttccagatagtggtcgttaaaggccacgttctgttccggatccagcacttccagcaacgctgaggccgggtcaccgcgcatgtcggaggacattttgtcgatctcatccagcaggaacagcgggtttttcaccccaactttcgccattttctggatcagtttacccggcattgagccaatataggtacggcggtgaccacggatttccgcttcatcacgaacgccgcccagcgccatacgcacgtatttacgcccggtggctttggcaatagattgccccagcgaggttttaccaaccccggcggcccaaccaggcacaggatcggccctttcagcttgttaacgcgactctgcaccgcaagatactcaaggatacggtccttgactcgctccagaccatagtgatcggtatcgaggatctcttgcgcctgacgcagatcttttttgactttgctacgggcattccacggcacctgcaccatccagtcgatgtagccgcgcacgacggtggcttccgccgacatcggggacatcatcttcagtttttgcagttccgcttcagttttttctttcgcctctttcggcattttcgccgcgtcgatcttacgcttcagcgcttcgttttcgtccggggcgtcatccatctcgccgagctctttctggatggctttcatttgctcattcagatagtactcacgctgagatttttccatctgctttttcacgcggttgcgaatgcgtttctcaacctgcagcagatcgatttcagattccatcatcgccatcagatattccagacgttcgttcacgtcggacatctccagcacggactgtttgtccgccagcttaagcggcatatgcgcagcgatggtatccgccagacgcgcaggatcgtcgatgctattcaacgacgtcagcacttccggtgggatttttttgttcagcttgatgtagccttcaaactggctgatagccgtacgcaccagcacttcctgctcacgctcttcaatgaccggagaagcaaggtactctgctttcgcagagaagtgctcgccgttatcagacagcgcagtaatacgcgcacgctgtaagccttccaccagcactttcacagtgccgtccggcagcttcagcatttgcaaaattgacgccacggtcccgacggtgaaaagatcgtttacacccggctcatccgtcgacgcttctttctgcgcgaccagcatgatttttttatcatggtccatggccgcttccagacaacggatagatttttcccgccctacaaacaggggtatgaccatgtgcggataaaccaccacatcgcgcaacggcaatacggggatttcaatgcgttcagaacgctcaggattcatagagctctctcttagtttaaagtccgccaggtagccgacgacgccttcattaacgcgtcgccgttaatatgtaatccagtatatggggatgtattccatacattcaacggcgggaacacaggaaaaataaaagggggataaaatcccccctttttgcttaactgcttgtgccgattggcgaattattcgccagatgcctgctgcgcttccggcttgccgtagatcagcagcggcttgctctgaccttcgatgaccgactcgtcaatcaccactttttcgacatcttccatggacggcagatcgtacatggtgtcgagcagcgcggcttcaacgattgaacgcagaccacgggcgccggttttacgcgccatcgcttttttcgcgatcgcatccagcgcttcatcacggaattccagctccgctccttcaaggccaaacagcgcctgatactgcttagtcagggcgtttttcggctctttcaggatctgaatcagcgcttcttcactcagttcattcaacgtcgcgacaaccggcagacggccgataaattccgggatcagaccaaacttgatcagatcttccggctcgacctgcgccagcagttcaccttcgctggctttgtcggatttcgctttaaccgtcgcgccaaaaccaatgccggacccggtttctacgcggtgggaaatcactttgtccaggcctgcgaacgcgccgccgcagataaatagaatcttggaggtatcaacctgcaagaactcctgctgcggatgtttacgcccgccctgcggcggaacagcggctacggtgccttcgataagcttcaacagcgcctgttgaacgccttcgccggacacgtcgcgagtaatcgacgggttatccgatttacgggaaattttgtcgatttcatcgatgtacacgatgccgcgttgcgctttctgcacatcgtaatcgcatttctgcagcagcttctggatgatgttttccacgtcttcacccacataacccgcttcggtcagtgtggtggcatcagccatggtaaacggaacatccaacagacgcgccagcgtttccgccaacagcgttttaccggaaccggtcggcccgatcagcagaatgttgcttttacccagttctacgccgttgctggtatcgccgttacgcagacgtttgtagtggttgtataccgccactgccagcacttttttcgcctgttcctggccaataacataatcgtccagatgatggcgaatttcgtgcggcgtcggcagcgcgctgcgctcgcggtgcggagcgacttctttaatctcttcgcgaatgatgtcgttacataaatcaacgcattcgtcgcagatatacacggatggcccggcgatcagcttacgcacttcatgctggcttttgccgcaaaaagagcagtacaacagtttgcccgaaccatctttgcgtttatctgtcatgagtccaaacctcttcttaagttctttgtgccgcagatgacgacgcaaatgccattctcaggcgcaagtcgcgatcacgcgttgtgccgcccagtagttaaaacaagtatagcggcacccttacgccacgggcatcaattacgatgggtcaagatggaatcgaccaggccgtattccaccgcttccgacgccgacaggaagcggtcacgctcggtatcgcgctcgatctgctcaagggattgacccgtatgatgcgccatcagttcattcatgcgccctttcactttcagaatttcacgggcgtggatttcgatatccgtcgcctgaccctgatagccgcccagcggctggtgaatcatcacgcgggagttcggcaagcagaaacgcttgcctttcgccccggcggtcagcaggaaggcgcccattgaagccgcctgccccatacagatagtactgacatccggcttgataaactgcatggtgtcgtaaattgacatcccggcggtgatcacgccgcctggagagttaatgtacaggtaaatatctttttctggattttccgcttccagaaatagcatctgcgccacgatcagattagccatgtggtcttccacctggccagtcaggaaaataacgcgttccttgagcagacgggaatagatatcaaaagaacgttcaccgcgtgaggtctgttcaatgaccatcggcaccagggccatatggggtgcaaagttatctcgttcgccactgtatgacatttccgtctcctggattaattttgaaaaaacctgctgcactgattgtaaccttatggacggattatcagccagagtttctatccgcagggcactgatacgttgacctggtcattattcctgacgctgcggatgcagatacgtcacccggttatggggatggcgcagccataattcaagcataacaaccttttggagtaacgctatcactgaaaatgtgttttagcactcatcctaagcctatcattgcaataaaaaaaacccgccgcctttcggcaacgggcttttgcgcgaactttaaacagccggacgaaattacgcctgctggttcatcagttcgttgaaggaagtggctttttcagacactttagctttcgccagcacggcttcaacagcctgctcttccagcgccacgttgcgcatgttgtccatcagctctttgttcttgctgtagaactcaaccacttctgacggatcttcgtacgcggaagccatctcttcgatcaggcctttcacgcgctcttcgtcagctttcagctcgttggtacgaatcacttcgcccagcagcaggccaacaactacgcggcgtttagcctgctcttcgaacagttcgcgaggcagttccagagcctgtttctcgttgccgccgaaacgctgagcagcctgacgacgcagtacgtcgatttcgctgtcgatcagagcagccggaacgtcgatgtcgttcgctttcaccaggccttcgatagcctgagatttaacgcggttacgcacagcgcctttcagctcgcgttccatgtttttacgcacttccgcgcgcagaccttctacggaaccatcttcaacgccgaaacgtttgatgaattcagcagtcagttccggcagttcgcgttcttcaactttcttcaggttgataacgaacttagcggctttacctttcaggttttcagcgtggtactcttccgggaaggtcacgtcgatggtgaactcttcgccagctttgtggcctttgataccgtcttcgaagcccgggatcatacgaccctgacccatcgccagtacgaagtcagacgctttaccgccttcgaactcttcgccatctacggaaccagtgaagtcgatggtaacgcgatcttcagcgtcaacggcgccttctttctctttccagttcgcctgctgtttgcgcagggtgtccagcatgccgtcaacgtcagcatcggtgacttcaacaaccggtttttcaacttcgattgcgtccagacctttcagttcaacttccggatacacttcgaactctaccgcgtaggtgaagtcttcgcccagcttgtattcgcccggaacgtagttcggcgcgccggccggattaattttctctttgatgattgcgtcaacgaaatgacggctcatcaggtcgcccagcacgtcctggcgaacggaagcgccataacgctgagcaacaacattcatcggcactttgcctttacggaagccgtcaatgcgaacttttttcgctacgttgaccagctcgcttttgacagcattctcgatgctgtcagcggcgatagtaatcgttacacggcgcccaaggccctgagtggtttcaactgaaacttgcatcttgttacctcaaaaaaatcacagtgctcggtcaactctggaagcgcgtgtaggtggcttcgcagaaccgggatgccctcttcaaatcagaaacacattccctgtcgtcagaatcatcccgaagacattcatatataagacgcggcattatagcggcatcacttttgtgagtcgagaacggttgtcacccactgctgcggcgtttttcacatttcccgctcaaatttgtctgcaaaagcgcgaactttgcgcattttccaggcaaaagaaaacggcccgcaggccgtttttgctaaatcttcacgcaacatactggaaaagcgccagcggttgcaaatgtgatttttacgcgatgcttcctgctccgcggcatggcggagaggcaaagacggtatcctgtagaccttcccactctttaatcgtgtaagtatgcagcgccagggcgtgcacggtgcttgacagctcctcggtcaacgtaccgtaaatcatacgatgacgattaaggaaacgttcgccggtgaagcggtcgctcaccaacaccactttaaaatgactttcagagcccgcagggacgttgtgccgatagctttcatccacgacttccagatacatcgggtcgaacgctgctctaagttttgcttcgatctgctcacgtatcatcatgaattttctcctccgacaacgctgagatgccgcctttccctttaaatgttagccgcttttaccgcttccattggcagaaaacaacaaaaaattagcattcctctgatattttcacgcaaaagtatcaggtttactgatgatgaatgctaaatctcccggccaaatcgccaccggaaatgggacgaggtcataaaacgcacaacacgatgattttccactcgtagccacttcccctcaccgttggcgatgttatgatggcgggaattttccttaaacaccctaactacttcgagttgcagaaaaaagcgcccgcgattccccgtagcgcctgaaacctgaattatgacgggtataacaacaccgtgcgttgagaccctgaacatgctgaagaaaattctattcccgttggtcgcgatgtttgtactcgctggatgcgccactccgccgacgaccattgaagtatcgccgaaaatcaccctgccgcagcaggatccgagcctgatgggcgttaccgtcagcattaacggcgcagaccagcgtaccgatcaggcgctggcgaaagtcacccgtaacaaccagttggttactctgaccgcctctcgcgatctgcgcttcctgctgcaggaagtgcttgagaagcaaatgacgtcgcgcggctacatgattggcccgaacggcgccgtcgacctgcagatcattgttaacaaactgtatgctgacgtctcgcagggcaacgtgcgttacaacatcgccactaaagcggatatcgccatcgtcgccaccgccgctaacggcaacaagatgactaagaactatcgcgccagctattccgttgagggcgctttccaggcttccaacgagaacattgctaacgcggttaatagcgtgctgaccgataccatcgccgacatggcgcaggacaccagcattcacgacttcatcaaacaaaacgctcgttaataaaatagcaggcccggttcactccgggcctgctctatatgccatgtccaatcactacttgcgtatttttcagcaacccaaatcagctattttgctgatcctcggctttgcttctggtttacctctcgcactgacttccggcacgctgcaagcgtggatgaccgttgaaaatatcgatttaaaaactatcggcttcttctctctcgtcggtcaggcatacgtatttaaatttttgtggtcgccattaatggaccgctacacgccgccgtttttaggccgccgccgcggctggctgctgacgactcagcttgcgctgcttatcgccatcgccgcgatgggctttcttgaacccgcaacgcagttgcgctggatggcggcgttggctgtagttatcgctttttgctccgcgtcgcaggatatcgtctttgatgcctggaaaaccgatgtcctcccggcggaagaacgcggcgccggtgcggccataagcgtactcggctatcgtctgggaatgctggtatccggagggttagcgctctggttggccgaccgttggctgggctggcaaggaatgtactggctgatggccgcgctgcttattccgtgtattatcgccacgctgctagcgccggagcccagcgacgtcattccggtacctaaatctcttgagcaggccgtcgccgcgccgctgcgcgacttcttcggccgcaacaacgcctggcttatcctgctgttaattgtcctttataagctcggcgatgccttcgccatgagcctgaccaccactttccttatccgcggcgtcggttttgatgccggtgaagtcggaatggtgaataaaacgttgggcctgttcgccaccattgtcggcgcactctacggcggcgtactgatgcagcgcctgacgctattccgcgccctgctgatctttggcttactgcaaggggcctccaacgccggatactggatcctctcagtcaccgataaacacctttattcgatggcggcggcggtattttttgaaaacctgtgcggcgggatgggtaccgcggcgtttgtcgccctgttaatgacgctgtgtaacaagtcgttttccgccactcagttcgcgctgttgtcggcgttgtcggcggttggtcgcgtttatgttgggccgattgccggctggtttgtcgaagcgaacggctggccgacgttttatcttttctccgtcgttgccgccgtgccggggattttgctcctgcttctgtgtcggcgtacgctggaatatacccaacgaacgggaagcttcttgccgcgtacgcaatacccgcagatttacgccctggcgctggttatcctggcggtaggttgtttgatgctggcgatatggctgctgctgctggcgatgaacgcgctggattacacttctttctccttcctgcctgccctgctggaagtcgccgcgctgaccgctatcggtggtattttgctcggcgcggttctggactatatggcgctacgcaaaacgcagctgatttaattttcgccaaaccgttaatagccgttttaattacccgaggtaattataacggcttattagcgattttatttttccagagaactgatttgttgttttgtgcgttttagatttctggaaattattgacaatttttacgcgattctttaattaatttaaccgattcagcagcgttactttattttaacgttttctttatgtcttgtatttgataattaattgttaattatttgttttattttaactgtgtttatacccgtatccccataagcattccctttcttatccctttcgttatagatccagcgtaaatcaggctttgcaagcaattacgtcacattccgtaacatatgtgacaatccaagcagaacccgctaacacagaactgacacagatccaatcgtgtttacagtaatgcaaccttaccgtaaaatgcccatacactttaaacgccaccagatcccgtggaattgaggtcgttcaatgagactcaggaaatacaataaaagtttgggatggatgtcattaatcgcaggtactgtattactcagtggttgtgattctgcgctccttgacccaaaaggacagattggactggagcaacgctctttgattctgacggcattcggcctgatgatgattgtcgttattcccgccgtcttaatggcagtaggatttgcctggaagtatcgcgcgagcaataaagatgcgaagtatagcccgaactggtcacactccaacaaagttgaagctgtggtctggacggttcctattctgatcatcttgttcctggccgttctgacctggaaaaccactcacgctctggagccaagcaaaccgcttgtccacgacgagaaagcaatcaccatcgaagttgtatcgatggactggaaatggttctttatttacccggaacagggtatcgctaccgtcaacgaaatcgccttcccggcgaacgtaccggtacactttaaagtcacttccaactccgtgatgaactcgttctttattccgcgcttaggtagccagatttatgcgatggccgggatgcagactcagctgcacctcatcgctgatgaagcaggcacttatgacggtatctccgcaagctatagtggcccgggcttctctggtatgaagttcaaggctatcgccaccccggatcgtgcaaccttcgatcagtgggtagcaaaagcgaaacagtccccgaactccatggactccatggctgcattcgacaaagtggctgtgcctagcgaaaacaacaaagtggaatacttctctaatgtgaaaccggatttgttcaaagatgttgttaacaaattcatgtctcacgagagcatgaacatgtctaaacctgagggcgagcacgctgcgcacgaagggatggaaggcatggacatgagccacgcggaaaccgctcactaaggggccgaggaagaaaacgatgttcggaaaacttacactggatgcagtgccctaccacgaacctattatcgtggtaacggttgctgcaatcatcgtcgggggactggcgatactggcagcgatcacttacttcggtaagtggtcctacctatggaacgagtggctgacgtccgtcgaccacaaacgtctcggtatcatgtacgttatcgtggcaatcgtcatgctgctgcgtggctttgctgacgccgtaatgatgcgtagccaacaggtgctggcctcagccggggaagcaggattcctgccacctcatcactacgatcagatctttaccgcccacggcgttatcatgatcttcttcgtggcaatgccattcgttatcggcctgatgaacctggtggttccgcttcagctcggcgcgcgtgacgttgcgttcccgttcctcaacaacctgagcttctggttcacggttgtgggcgtgattctggttaacctgtctctgggcgtcggtgagttcgcacagaccggttggctggcatatccgccgctttcgggaattgagtacagtcctggcgtaggggtcgattactggatttgggcgctgcagctctccggtatcggtactaccctgaccggtatcaacttctttgtgaccattatcaagatgcgtgcccctggcatgaccatgttcaagatgccggtattctcctgggcatctctgtgcgccaacatcctgattatcgcctccttcccgattctgaccgttaccgtcgcgctgctgaccctggaccgctacctgggcacccatttctttaccaacgatatgggtggcaacatgatgatgtacatcaacctgatttgggcctggggtcacccggaagtgtacattctggttctgccggtattcggggtcttctccgaagtcgcagcaaccttctcgcgcaaacgtctgtttggttacacctcgctggtatgggcaaccgtctgtattaccgttctgtcgttcatcgtttggctgcaccacttcttcactatgggtgccggcgcgaacgtaaacgccttcttcggtattaccactatgattatcgcgatcccgaccggggttaagatcttcaactggctgttcaccatgtaccagggccgcatcgtcttcaactcggcgatgatgtggactatcggcttcatcgttaccttctccgttggtgggatgaccggtgttctgctggcggtaccgggcgcggacttcgtactgcacaacagtctgttcctgattgcgcacttccataacgtcatcatcggcggcgtggtattcggttgcttcgcaggcctgacctactggtggccgaaagcctttggtttcaccctgaacgaaacctggggtaaacgcgctttctggttctggatcatcggcttcttcgtagcatttatgccgctgtacgtgctgggcttcatgggtatgacccgtcgtctgagccaggacatcgatccgcagttccactccatgctggtggttgcagcatgcggcgcggcgctgattgcttgcggtatcctgtgccagctgatccagttctacgtttctatccgcgatcgcgatcagaaccgtgacctgaccggtgacccatggggcggtcgtactctggagtgggcaacttcttctccaccgccgttctataacttcgctgtcgttcctaacgttcacgaacgtgacgcgttctgggaaatgaaagaaaaaggcgaagcgtacaagcaacctacgcattatgaagaaattcatatgccgaaaaacagcggcgcgggcatcatcattgctgcattcgcaacggtgtttggcttcgcgatgatctggcatatctggtggatggcgattgttggtttcgccggcatcgtagtgacctggattatcaagagctttgacgaggacgtggattactacgtaccggttgcggaagtcgaaaaactggaaaatcagcatttcgatgagattaacaaagcagggctgaaaaatggcaactgatactcttgcgcacaatgcccacgcgcatgaacacgggcaccatgatacaggaccgatgaaagtcttcggtttctggatctacctgatgagcgactgcattatcttcgctacgctgttcgcaacctatgccgttctggtgaacggcacggctggcggcccggcgggtaaagatatttttgaactgccgttcgttctggttgaaaccgcactgctgttattcagctccatcacctatggcatggcggctatcgccatgtacaaaaacaacaagagccaggtcgtttcctggctcgccctgaccttcctcttcggtgcagggttcgttgggatggaaatctatgaattccatcacctgattgttgaaggtatgggtccggaccgtagcggcttcctgtcagcgttcttcgcgctggttggtacccacggtctgcacgtcacttccggtctgctgtggatggcggtgttgatggttcaggtatcgcgtcgcggcctgaccagcactaaccgtacccgtattatgtgcctgagcctgttctggcacttcctggacgtggtgtggatctgcgtgttctctgttgtttatctgatgggggcgatgtaatgagtcattctaccgatcatagcggcgcttctcacggcagcgtgaagagctacatgacagggttcatcctgtcgatcattctgacggctatcccgtttgcaatggttatgagtggctctgcctcgcatgcagcgattctgggaaccatcctggtcacggctgtagtgcagattctggtgcacctggtgtacttcctgcacatgaacagtaaatctgacgaaggttggaacctgaccgcgtttatcttcaccgtaatcatcattgctatcgttgttgtcggctccatctggattatgtggaacctcaactacaatatgatgatgcactaagagcggcgagtatgtttaagcaatacctgcaagtaacgaaaccaggcatcatttttggcaacctgatctccgtgatcggcggtttcctgctggcctccaaaggccacatcgactatccgctgttcgtctggacactcctcggagtatccctggtggtcgcctcgggttgtgttttcaacaactacatcgaccgtgatatcgatcgtaagatggaacggacgaaaaaccgggtgctggtcaaagggctgatctcgccagaatcatcgctggtatacgccaccttgctgggtattgctggcttcatgctgctgtggttcggcgctaacccgctggcctgctggcttggcgtgatggggtttgtggtttatgtcggcatctacagcctgtatatgaaacgccactctgtctacggcacgctgattggctcactctccggcgctgcgccgccggtgattggctactgcgcagttaccggtgattttgacagcggcgcggcgattctgctggcgatctttagcctgtggcagatgcctcactcgtacgccatcgcgatcttccgtttcaaggattatcaggcggcgaatattccggttctgccggtagttaaaggtatctccgtcgcgaaaaatcatatcacgctgtacatcgtggcctttgccgtggcaacgctgatgctttcccttggggttatgccggatacaaatatctggtcgtagcagccgcggtaagcgtctggtggcttggcatggcgctgcgcggttataaagtggcggatgataaagtctgggcacgtaagctgttcgtcttttccatcgtcgccatcaccgcgctgtcagtcatgatgtctgtcgatttcatggtgccggattcacataatctgctggcttacgtcagataagattacgcgaaatgtgaaatgaaaagagcctccgctagccggggcttttttatgcgccaatatcgggtcacttcatcaataccgccctcccctcacttttgtacttcattttcttcactcatcacgcagctaaaaattgaggaaaaaattgagcattgctaaccgccagccatctcgcgccattagcggagatggtgctagccttacatggtaggcaagcgacctacaataatatggatttttaatagcaaggaataacaatgaaagaattaacattcaacgaaatggaatctgtctcaggtggtttcaacctggtgagcgctgcaaccggcttcgccagctttgtcgctaattctgcggcagggttttcttcatttgctctgacctccggtctggcttttgcctcttttgtcggcgatagcgcgattgaatttggtaaattcctccttggacaggcaaactgggaaagtgtagtcagcaccggtcaggaaaactgggcaaacttcgtttctaccgctggtaacagctggaacactttcgtgaacaatgccgctaccgactggaatagcttcctggatcaagctgcttcctaatcggtataatgataagggcagatttcatttctgccctttctgttgttttaaatcttttatttagcgcctcaccattttagcctctggttctcatcccttcttctattacgcaacacagtcgtaatatctgctaaacaaacatttatttacgcgtccttatcccccactacactagtcacagtttttatattgaggtggtaatgaacgataacaaaatgacgccaggagaactgcgcgcaacctggggtttagggaccgtgttttcactgcgcatgctcggcatgtttatggtcctgcccgttttgaccacatatggcatggcgctgcagggggctagcgaagcgctgattggtttggctataggcatttacgggctcgcccaggccgtcttccagatcccgtttggcctcctgtctgaccgcatcggccgtaaaccgttaattattggtggtttgctgatatttgttatcggcagcatcatcgccgcgctgaccgattccatctggggcattattcttggccgcgccctacagggttcaggcgctatcgccgccgccgtcatggcactgctttctgatttaacccgcgaacagaaccgtaccaaagcgatggccttcattggcgtcagctttggcgtgacctttgccatcgctatggtgctcggccctattgtcactcaccagttggggctgcacgccctcttctggatgatcgctattctggcaagcctcggtattttgctgactctgtgggtagtaccaaatagccacaatcatgtactgaaccgtgaatctggcatggtaaagggctgtttcagcaaagtgcttgctgagcctaaactcctcaagctgaacttcggcattatgtgtctgcacatcatgctaatgtcgacttttgttgcgctgccaggacaactggaggccgcaggtttcccggccgccgagcactggaaaatttatctggtaaccatggtcatttcctttgtcgccgtggtgccattcatcatctatgcggaagtgaagcgcaagatgaaacgggtgttcctgctttgcgtcgctctgcttctgatagcggaaatcgtgctctggggagctggtggctatttctgggagttagttgcaggggtgcaactgttctttctcgccttcaatctactggaagcgttattgccttcgttaatcagcaaggaatcaccggcaggctacaaaggcacagcaatggggatttattctaccagtcagtttatcggcgtggccatcggtggcgccctgggcggctgggtagacggattctttgactcgcagaccgtgtttttactcggtgcgctactggcgatgttgtggctactggtggccagcaccatgagtgaaccgccttatgtcagcagtttacgtgttgagatcccggacgatgtagtcattgatgatgagctacagcgccgtctgttgtcgaaacctggcgttgagcaggtcatgattgtcgctgaagaacgttcagcctatataaagatcgatagcaaagtgaccaaccgcttcgaggttgaacagaccatcatcgcaatttcataatagacctgaattgctgagctctaaacaataagttgcacgctcgcacacacagaagatactctcgggtatcttctgttatcaaatatgaagtagctaaataatacccatcacttatctaagtgtcgtttgtgaattttaattcacattaaaactaatagatcatttaaatattcactattatataaaaaaacctctgattagtatattgcccggtgtgtataagcacatcactaactattcattaatctaggatggaattaaaaatgaaagaattaacagcaaacgaaatggaatatatctcaggtgctggtattatcgacctgccttgtgctttggttgatttcacgattcaatcagcactgggcctggtagcagcaggtattaatgctggtatggttctgacctcctccgctctggaaaccactattgatctaatttccaatattcttggcggttcgccatctagcctgggaagcattctaaccgaccatatcaactccctgctgtatgcagaatctggggtttggtcaaatttcgtttataatgctgcgactgattggggcggcgttgttgatgccctgcaaagctaaatagaataaggccagtcagcattctgactggccttattttcctttcaatttctaatttttattattttcaccacatctgagatacatatcacaggcagtcatgtaatcttcatgccacttccaatagacatgcaagtaaaagtatcctatcgcaggtatcatacataaagtaaaatatgcataaaaatatatttcccaccctaaaagtttcaacaacagactaacagtcacaatccagaaaacctgaagggtgaagaaaataaccaatctaaaccacaaaggtttgctatttaccccaggaagtatcatcgtattgacaagatttacatcaaactctttttgcaaaagtctacctaaaaaggtgtaacgcctggaagggtgagcgaaagacagattaaccagcaggattaatgaacataggatcagcatagccaccatcaagcgaggtgaaaaaaagccatcggctaaggaaaaatcatcatctgcaatcaacggactgataaccgcaaaactggtcaagacagtcacggtaacgttcaagcaggtatagtgatggagattacgatatttaagcgtatagatagttgcctgctgcaactgcttgacgtaacaatttctcgccatccaacacattatatagattatcattggcacaaaaatagcaatacagaacatggctacaatggttgaaaaaaagagtagaaatcctgtaacaaccagatagcaactcagtaaacagcacgttgtagcgacaagcggctgccacagtattatttcaaatcgcgaatagtttttcccctgcaaccaagaaaaattgatattccttatcgcatatttatatgcccaatatccctttaactcataaacaaagctgaacatagttaacgaaaagatggcacttactggaaaggcatcctctaaggttaacagataccctctgtttttgacgtaaaatgcaattagtaatgtagtaagaaagtacaaatacggtaaaagcgaccgatcctgacgacgaataaacgttaaataatccggaatcatgataccctcgttacgccgccaacatttttcgacaatgtgtaaaatattctacagagaaaccgtcgaaatcatttagcagatgcccaagatacgccttgttactgatttcaacaaacctgacggagggatatgttgtaaaaaggcggccatcgatgcgctccatcgtactctatgggtcaaatgcaaagataagttctctttaattctctccggattatattcttcccgtccagtgacattcatcagtacaggataatttggccgtacaatctccaccgtcttgagcacatcccgcatgggctgaatcccctcagacataagaggcgtatgccaggctccgctaacacctagcttgacagcatccagacctgcccccatcagaaccccagagaattcacttaaatctggtagcgtaccgccaatcacctgctgcgagggactattatcacaactcaccacgaccgggcttccggagtcgataatcaactgacttaccgtttgaaaatcggcacctctcacggctagcatcgcgcctttgtgaatattgcttaaatcgcccatgatagtggagcgcgccaatattagcttgaacacattttccagcgttaaggcgccggccgcataaagtgcgctatattcaccaacgctatgcccgcacgaaccaacaacgttcgcgtcagcgaatcgctcggcatacaagctatagagagtgatattgatagctgtcaccgccgactgctgcgtcgtcgttttcaccagacgattcatcggtcctttctgacacaaccgacgaagatctaaccctgtcacatcgctggcgcagtcccagatttgtctcgtcgttgtattcaaatcccataaatcagctcccattccgacggcaggatttccctgaccggcgaaaataagcaccgttggctggtctgatagctttatcatagaaaaaatatccttataaataatatttaaatccaacgtaaactccgagagtctcgccaaaaagtgcgaactcagaatcacgactacctaatgcgctatacaaccccgtataagtctcagccttttcgctcaccccttttaatggctggacaaaatgggccccgattaaggagctaccatcgactaagttcaccactaaataaggctgaaaagttgaatgatctatactctgtaaacttaaccatgaagtaatgtaatgccgcccctgcagcatacctttatttcccgtattacttatttctgaacccatcagatacttataatcatctaatacttggtctaagctggaataaccggtttttttacttaatagcctaataaaatcagcctgctctcgccatgccgattttgagtagccttcgctttgatagtagtactcaatgccaaacacactaaaaaagtcagtggtatattgcccaccaacggctaattcataaccttttttgtcattctgcgcatataacgatgaaggatatagcccagaaagcacctcgttccgtttttcaacagaaaagtgacgccactgttgcgttttgtgcaaagccgcttctacgttgacaacaaactgaggagttaaattatagccatcagatagtgccaatgaaggagagtcgccaagcattatattcgctgctagccgatggttaacaagccgataatcggtataacttaataaatagtattcactgctgttagccctttgattggctgtccagttactggatgattcataatatttatcgatacttgctaatttgggtataacagtaagtgagaatgcataatcacgaaattctttggctaaccgcccccccaatacgactcgctataggcggactccagcttcggatcgtatattcgtgtcggtttaaatccggcataataggaagtcaacagtgatgcaggtgattttaaatgaaaggcacctggaaatgaatttagtttcccaccttcaaaacttatactatcagacaacgaccagttaatcttgagcctatcaattaatatttttgcgcgatgatcatcctgttcgaataatcctacttcttttatcgcataatatcctaaactatataatgaaaaatctaatcccagcacgtcctcaatgaaggaacaagcgcttgaaatattaatagaaatatcattatacgcattgtcggccgtgtatggattagcgccattgatgcgccaaatggagtcacttttgtgcgcaaaagatgcctgcgcgttcaaaataatctgaccattcgagcgtatttggtcacctgacagacaattagccattccccataatggtgttagtgacaaagcaaatagcaatgtacccagatggcccttcacttcgcgcctcgctgaataaactctttagtgaagtggaattcaggcaacgattcaaggcgaacatcactatacttcatgacagaataacctttttcatagcgagcattctgcacaataatctctgttggacgattcttccctaataccatctgatagtttttatacaagacacttttgagaagttgattatcaagagaataatatgatgctttaaatggccgatattccgcatttttttccaccaggtaaatcactttaggataagtaacggcctcagatttccgagtgagagacagtcgatagcaaattttatctccgcaaggctcttccccttccagggtcgaatcataagcatactcgaagttcgtcactataacatcgccattagagatctgaccaattaatcgttgtgagcgcgaaataggaataggcctgcgtaattccggcgtataaaaccataagtcataccaatcagataacatgatcttacctttatctcgcggaggataggtaaaacggataagtgaacgagcgtcagctttcaaaccgttttctggtttaataaagcgcatcgatatatccagcgactgcatgttttcaggcactttgccaccctctttatactcaagtacagtcacgttatagcgaaaaggctcatttggtgagcgaacatcatcagctctccgaattatatccagagcttgcaggctattactcgtagcctgcaccgggacagaatgcaaatacatagctatgataaataaatacaatacactggttttcatactttcctctatgaaaatttgaatgcatcagtgatgttaaggcgcgatgcacggtatgcgggaataatggaagccacgactgatgttaaaattggtaatatcatggttacccagatcaattcaacatcatttgttttaataaatgcggtgtagcctactgactggcccggcgaaggtggcatcgcaataccagaaatattaattatggcagcaatagtgaaaccaaagaaaagactccccaatgcgccaaagataccgatatatatgccttccatccagaataaacgcgtaacacgacttgattgtaaaccaattgcgcgaagtgtagtaatttcccgggttcgttcaacaatattcatcgtcattgaattaccgatcatgaaaaccacgataagcgccacaataagtttaataaaaaaatagatccccgacagcatgccttccacctgctggtaaaaaatagagttctccttccagtccttaacgatcagaggcaaatgctggtctgctatatattctctcattttcttaacaaaagatgttacatcatcgttgtttagcaagatgactatcttactaacaccatcagtccccataattcgctgcgcagtctcaagaggcatttttataacaacatcgtcataatcctttattcctgattcaaagacgccgcgtagtttgacagagatagccccctgccctccggctatattaaccgccatgacatcaagccagtcaccatagtggctatctagtgtttttgccagaccactgccaatagtaacttcattgtgttttacacgagataaatcgctaccaaaaactatcttatcaaatgcccctaacttcagggctggtaaaggttctacgccttgtgctgaaaaataatttgacgtttcactttcgtagtgtgaaattattccggtaaattcaagctggccagctattgttgaaatctcattagaaaaatcggcgttatgcaaaattttattttttaacgtagcataatcagagatcaggctcttatttttgttagcggtttcaaaataggtcctgttgtaaatttgcacatgaccaatgttggtacgtatcgtttgttctttgagtatccaaaaagagtagttgataaaaccaccatacaaaaatattgcgcaaccacctaaaatgatggcagaaagagtagatattgttctacgccgatgtcgtagcaagttcaaaaatgagaattttgcatcgccaaaattaaagatgacattataaataaaaaacattaatattaaaaccagaatagaattaaaaaatatcatatcctttgacatttaatcacccttaataacaggaacgataacctgcatgacttcagccatttcccaaaccggcgactggttactttcaaaatcaatttcacgctgctgattgattctgcgaagatgctcagtgagttgcttttcttgctgtttgcgatggcaattatgcagtgctcgcaaacgcattgtaattatattattaataacctcaccgctaaatttttctttattttcaagaagtaaatcagtatcttcgattgtaatcacgcagcgccctaatcccacgggaagccaggcatccactcttgcacgcaaatatcgaattagcatgttgtcttcattagcatctactgattcatccagataaaagaatccagtcttcgcgtattcagaagcgttaattagatcattgacactctgataatagttagcctgtcgcaacattccccatgagtaaaagatcagcgcgccgacgttgttagtatgttcatattctttaaataaatcagcagtgatagatgctaaagcttctggctcaccaggaaatccgttctgtaagacacgggaggtcgcaggagttgatcccatctcagcaaatactgcaaatgtaaacatggtcagacacaggaggaaaattttaaaaagattacttcgctgaatcataaattattgctccatccttaatttccacgctccgtcttgcgcgatctttaagttgagtcgaatgtgttgagataataaaagttgttttcgttcgctgattaatctcaaccaggagatccaaaatcgattcaccggtagccagatccaagttaccggtaggttcgtcagcaacaataacttcaggactatgcgctagtgcccttgcaatagcgaccctttgctgttgaccacctgacaactggccaggttttctagccaataagtgggataaaccaacactatcgaggaaatgcaacgttcgctctcgggcctctttcgcattaaaatgaccattcaacgtcaggggataataaacattatcaaaaacactaagcaccggtattaaattaaaaaattgaaaaatgaaacctagatgtcgactgcgaaggtgtgcaagatttttttcagacaacgcattgagatttttatgcagaaagaagacatggcctgcagttggcatatcaataccagaaagtatatttagcaaagtactctttccgctaccggaaggcccacacaatacaagaaactcgcctttcacaacgtccagattaatattgtttaaagcataagttatattgtccagacaaccataggtcttatatattccagataacgaaatatcaggtagttctgttatattgctgcgcatattccctcctactggtaccaggtatcaaagtaggcatagccgctagctactcccggaataacggttctgatacaaccattatgtaatgcgtactggttaatatattgccaagttaacgccggtgtcacacatccgctgcaaccgtagcgagcgataagatctatcacgttctcagaggctgttatggatttatttatacctccggcataggcaatgcagtcaacatcattgatatttttatgacccggcagactaatttcatttacatcagcatatgtgtatgggctgcagtgtactttgaaaccaccttctcttttactaaaaacaaagcaacctacccgttcgatagataaattcacaccaggaatatgatgatatttctttttttctttacgttgtttcatactttctgcagtgaaagctaacaatggcacagctcggtatccaccacagataacgacaaaatcaaaaacatcccagccgagataatcttgagccattgccatagcctgaaagagtgaattattttcaccgcgaattttgcaggttacatcattgatggaaaattttttgatcagactctttggtaaagtatcaatagtggataaattaaggctactgatattgtattcaaacacgcctgactctccccatgaatcgatatagataaatgcggttcgcgatttaagtaataacatccgttcttttgctgacaagctgtgtaaagcggcatctgataccttatcaagagcatttatataaggtatatgatctggtcgtcttgtaatctcgcgcgtatatacatcgtttcttgttccaaagcgtttgaacctccaaccattagctccagttgccttcaatgctgtattgtaggagtgtgattcccaaacatttagccagcttggataatataaataaaatggttcttccggttcaaggaaagaatatgatgacaaatacatatcactctccctcgtagccagtgttggtatttaaattagtcattaagagtgcaatgacggaaccatctacacccaacccagtctttaataaatgtttcttgtcatgtctacttaccctgccctctgtcggtatatggcgcgagacatcatttatgatgtcatcattaacaacagggaaaattaactcaccgtttttcaaagagtgataaccaattactatatctatcaatcctgaaccggttgcggtataaccgatttgtcccttataggccagtaccggaagagtcatttcacttgtaaatatagcgatagcttttgcttcaacattatcacttgatgaggtgccattaccgtgaggtataaatgcacaaagttcttcttttgcacacccgaatcattcagcagtgaatttattaactttagaatgctggcactttgccagtaggcatcattactacgaccagcattaatttgtttataagccgagtaaatgcttattcctggacttttccctcgccctaatcgatgtcgttggttttccagcagcataacaccataaccctcagcaaaaagcacaccattgctattcacaccaaagggttgaacaatctcactatccagcattccctggctcacaagaaaacccagatcttgatatttaatttttgagatattgataatcagtgcaagatcaataccatttttttcaattgctctggtggccagatggatagctgttagcgatgagttacttgtgcagttcatattcggcggaaggtaacttaattcatatttcttcgccagattgtaagaaaagctatcctgagacatatttttcacagccagatttttaattgaggatgttaccgacacatcctccatatcattataattatagaaatttctataatccatgacatcgacacgaggaccgatcccagtaatgtacactctgaccctgtcgcctttcaggcagtcatcattgagaccagcctgaagtaaggcttcatcgataagtctatacaaatggtcaagagcgctatcattattctgctttagttttgcaatatttatattgccagagaacccacattctatagcttggttatctgatgcaaaccatggagataagttcacgcattttccctgctttaaactttcaattagcagcgaactattctctgcataaggcaaacaaacactgaaaccagaaataattgctctttcgttcaccgggctatccttttattacaattgcgtaataattaccaccttcggtagcaccaattaaaagagcatacttgatatttagatttaatggcttatgcacaaaattaatccttttatcagcgaatgcttgtgtatagggaatggcaggaactgattgttttttaatacaatcaagaatcactgacaagtttaaaagacccgcaaccgaagcgacaaaaccaaagaaagcattataattcactactgggacacgcggattatggcaattaaacgacatataaattgcattcatttctatcaaagaattcacttcgctgccattgctggtaccacataccaaatcaatgtctttcgatgtaatacctgcatcaacaagcgcacgagtaatggccagagacattgctgcggatttttcttcaacctgagtgatatcaaagtaggaattactacatgacttaccatatccggcgatttcggccaatacctcggctccgcgagaaaccgcagcctgtgggtcttctaataacagcatacaggcaccttcgccagggacatatccattcgcctctttagcatatatctgataatccgaagcatctgaggtcatatgaattttatttgtcacagcatccatatacagagacatggaagggaaatattcatcggctccgcccacaataacctgcggctggagctgctggcgaacaatttcataaccataagtcaatgcgccaagcgcagcgttttcacctgtcgccagcgttgtcgtatatccttttatcccctcggaaatcccgcagaatgttgtaattgagttcatcagggaaccgggaaattcagaagtacgtacttttctcgggtcaggtttcaaactctgcaaatacttataggttgtctcttgtggacctcgcgccattcccagcaccatgcccaggtcattgccatcgcgtttaatcttacgtttagccatattcaacgtttcagtgagtgcgatgagagcaaaagtcccgccgcgcgttgctttacgcggatcgtatcggcgtagatgtttacgaggttccagatcttttacctggtaagttttaaaattcttctcatcctccggctgttgataggtctctttctgatattcaggaccgaaaatttctgtaagctgattggttgttgccagtacatccaacagtgcattcgcctcctcaagtgtatcatcagggaatacgacaccgctgagttctacagggctatctgcttcatggatgtagtgaaggatttcatttatcgagtggcctatcgccgatactgcgccaatccctgtaatggcaacacgttttgcgtcataggaggtgagaggaacagagcctggttttgtactcacaatcatgcagcaattattgccgccgaatgcgtagttgttcttcataaagatattgatatctttttcccggaatgcgttcgcaacgtagtcaagatcgcaatttgggcgcgccagtgaaaagttcaacgttggtagaacattttgctcaggcagagtaaccaaacatgcaatcagctcaacaattccggcagcgccaatattgtgaccaaaataggacttggtggagctgatcaataaattttctgcccctgagaaaactttcttcatcgccagggtttctatttgatcattggcttcagtgcctgtgccatgcgcattgacgtaatcaatatgctcaggttgcacccctgcattcgccattgctttctgcataacctgcactgcgccattggctcttgggtcaggcccggtttcatgataggcatcgcaagatgttgcataagagagaatttcgccaaaaatggtcgcgccacgagcaaccgcatgctcgtactcttccagtacaacggcgccggcgccttcgccaatcgacatcccagattgccctgaaaatggcgagcatgattgcggatgcataacattcagggcatagaatccagcgaaggtaggcagatagataggctccgttcctatcgctaacatcgccttgcttttgccattctggatataatcaaaagccatgccgacagcattcggactcgccgtacaagccgttgcgacgagttccactccacctttaagacccagaagcgtagaagcgctggaacaacatgaagaaaagccgcctgagaaaagagctttacgtaacgagaatcgtcaacacgctgttcaaagagtggtagaaatgcttcagtccccgccgaagacacgccaacaatcagacccatctgttccagacactgttgattgctgaaaagatccgcctgatttagtgcctccttgccgactttatacgcccaaagcgcggcattatcgagtgatgagacaatctcttcggataattcaggacaatgaatttcgtgcaacatttccgccgcacgggcattctcaaaccatttagaaaaacgagcactgtcagttataccattttttttctccaacagcgcttgtctgaagtctttaatattatccgccagcgacgacagtattcccataccggtaataactactctttttctgctcgttttcataatatcctgacatatccttaatttttatcattatcccgttactgacggaaaaacagtatgaatgaggctaacaattaatacgtttcaagcgcgctcttagccttcgaagcatcaacatagctatgagttgttgggttaattaataaactacgattataaataaatggaatactttgcgttttagctgcaaattctccgtttgtagttacaatactaaatccagtaatatccgctaacgcatagcattcatcaataagtgccaacgcaatccagttttgcttcgctggagaatatacggcgttaacaatgataccaacctgatgcccatttaccataacaaggtcatcagaatcgatatggccacacccttcatccggtataattccaacaagtttacgttcagcactcttaagggataacgcttcgactgcactcttaccgataaaatcctctttatcgtattgaatcgcccactgcatttgcaattccactggattacgtgagtaactagaataaaggctttcatcccatcctggattctcaatcctcaccagcccttgataatctaaaccacccgtttttagtaaatattttgatcctatttcttgtagcctcatccacattgtaaccaggactgcttgagaaccgattaattgatatgcaaactcaccatgtttaccgcagcgaaacaccattaaaccatcatcggtgttcatatattcgtaataaggcagaccgatgatatcaaaaccataagcttccgccattatttcccaggcatagggccttccagcataacaacccccaatcttctccgtccatcgatttgatttctggaatatcctgtatatctagctcttcggccttaaggagaacttcatttagaattttataatttcctgagaagtcatatcctctgacaaaatataatagccttcttcagcacaaagaatataaacttcaccgcggatggttccatcaacgttaagtactagagaataaatcccctgctcatcacggataattgatacatctgctgaagccatgtagttcactagcgcccatgcatcatcacccatcacgctggtaattgacatatgggaataatcaacaagcaaagcattttcgcgtacggccttatactcttcaaaaatatcatgatatgaagaaggcacacatttatcattataaatgcccattagcgcattattttgcaggtgaagttcagaaagtaatttcataaaacgtccttttatacattataatcagcttagaaagatttcttctttaaaataaaagatgccagattatttatacttcgcatataagatggatcatcaccctcagaaacctgaatatcgaagattttatcaagcataacgataatctctgttgcatcaacagagtccagtttcaaaccgttaccaaacaatggcgtatcatcatcaatttgatgaggttcacgctgaacattcagacgctggataatctcggctttaattttaacaattatattttttcttttttcgatttcgtcattgatattggtcatgcctgctctccttgtaatttagtaacttctctaaaattaataattacaccctggctaataatctttttccctacgttagctgtaactgaataatgcttaaaaccactatcatcagaaaacgaaagtttgcttactacttcaatcgtatctccgggtaagctgtccctttaaattttaaattctgtgaagctaatacgcctcggacctgggctcgccgagtacatatcgtactcagcatatctggatgtctgataagagcgtagaggtcacgtaatgaactaagattttcaccatagcgtcgttgataaatatcacaaatgtcagtcagaaatgaataatattcacttgcctgaccaaatatctcagagataatggctccaggcataatcgggtcttctggaaaatgcccaagcagataggggtcattgtaagtcacatgcttaataactttaatgaagccattctctccatatttgtaatcaactattttatcgaccatgataagcggttgacgccaccctcccatggcaagaaaaattttagctggtattgaatacttagacataaatcaccgcattaccatgccaccatcgaccacgatggtttgcccaatgatatagcttgatgcggcagagcttaaataaacgatgacatcagctacttcgtcgcaccttcctagtctttttaatggaatagagttagtcacttcgcgaacgacagtgcgtggaaccttcttcgccattttagactcaatcatccctggcgccaccgcattgacacgtaccccccgtggcgccagttccgccgcaagcgtacgggtaaagcttagtatggccccttttgatgcactatagttggcctgtccgacgcttggaacaatagcagccacagacgcaacattaattacagcgggtgtttccgctgaacgtaataacattagtgcttctttcgtcaatcggaacaaactaaggagattagtattgataaccgaataaaaatcatcaaagctcattgatgcaaagagactatctttaacaatccctgtattatttaccagtacatccagtctcccggcttctctggtcaagtgctcgcacagcgctataacttcgtcttgcttcgaaagatcgcagggtaagatgtgaagcagctcaccagcgatgtgattttctttcagactaagcaatgacccggcattcgtcttatacagtgcataaaccgtacatttttgctcgagaaactttccacaaattgcaagccctatgtcgccgctggcgccagtaaccagcactttcttacctattagatcgttatagttatacatttatagtgagtgccttaatttaataaataatggttgcggctatcgcataagttcgacaatgcgaaatgcttagtgaaatattcataatatattgttcattaagtatatccttgatcttgcctgacactataaagtctggttttccattttcgtcatgcgtgacttcaatatcatgaaaacaaatgccatgactaaatccataaccaacagcttttaccaaagactccttcgccgcccaaaaacctgccgcacgttcataattagaatcaataattccaatatctctgatttcattagctgtaaaaactctcgagagaaaacctgatttttcattggttatagctttttcgatccgggctacttcgactatatcagtaccaatacgcataatatccttccatggagattaaatttggtaagcaagattaaagttaagcttatagctgtctacatctagatcatccggatatagaaagggtgaagataatgaagcatcatattccagcgctttaacagccccttttataccgaaaactccccctattattttcttaccgttaagatcctgcgaaggtagcttaccaattatttgaccataatccgtgccaatataggggacgaaaccattatatccagaaaccacatttagcgtgttttgtaagaagaaccctttattaccataaataccatcactattttgaaaaccacgcacactccagcgatcgcctattgtgaattgatcctgcaacgtcaaattatctggtgaatactgagccccaatattcagttcgtaataggcgttaacgggtaacatagttaaccatttcacatagttcacattcagattcaaaatctgactttgcttactaacggtccctgtacgcatgtctggtgtatcagtaccgccaaaagccttagtaaaccgctgccaggttaacgttgaatccagcgcagctccggtaaagtttcttttataatttaagcctaaccgtatgttgcccatatcacgtttttgcaaaactagctctgtgcctcccaatgtatagtcatacttccgtctgatcagttcggcactcgcagacaatttagagttcacattgcggtaaagcatacgattactattgagactgaaatattccgtctcacctacatagtcaaaagtatatgcaccaagatcaataccctgagttgatttacttttactataaaaaagactgagatcggtgtaaccaaaaggcacactataataggcactagcatttttataacccccggtttggctacctgttcccgcaagataaaaaacatcgctcaagctagtgatattatataaataccccactccaccaataagttggtttcctgtgctgtcatcaccatagttattatacgaagttctggcactccatattttttttcgttgtgtattaattaccagattactcgtgccattttcagggcctggcactatgttaattttaacatcaacctcaggtgttctctgtatattttccaaaccctgctcaatatccctaatattgagaatatcaccttgtgaaaatggcaaaacccacttacttatatcgttatcaacaatgataatctcagaaatccttccaggtatcactgctaactttaattttttagtcaagagatcttgagatggaatttccaccctcgttgttatatagcctgcatttatatagtaatcttgaaaaagcacagccgcttttttcaacccattcattcctaagcattttccagcaaccagtttttttattttatttaatccgcggtcgtctaaaaaatcattactaagtactaattcatcaatttgaaaacacggattttccaacgggaatgtgctatcggtttctttttttgcgatagcatcggagaacacatccttttgttctatttttcggtctttgaaagcagcgttatcattgttttgctgctcttttacaagccgccctaactgagcatcagccgctactgcagggccagcaatcaacaataccaggctaataattactatattgcgaatatccatttcataccctaatcaggtaaaagcagtaatcccttaccgcttttaccttcaccctaagttatttatttacctacaacggtaccaaatacatttacaacattggcagtagtctcaaatccttgagcgccgcctaatacagcccagaaaccagtattgactattttcttggcattgataacagccttaccgctggtatacaaattaccgtagttgtaaatattattacttgcagtgacatttaactgactatcagcaaccaggttagaccagttcgagatatttttagcggtgacattagtagtcttagctgtaatattcgcgccgagattattagttaaatcattagcagtggtgatattaagtgtattaccagctgcaatatcgttgttattagtaatagttttgccagtcagatttaaatcaccacctgcattaaaggcgtgattatttgtcacgtaaccggaagtatttactgtcagattgcctgctgcattcacccatccagtgttattgtagtcaccagtaatattaattaaaatatcactatctgaagagatgataccggtagcggtatttttggcaacagagccacttgcttttgatgatatcgcagttgcatcaatctgcatattgcctgaactataaattgttgcgtaatcagcagcaactttcttcgcagcaatcgtcatttttccggaattagcaataatctgccctttgttacttgcgagatcgccagtcagattaatatttacatcaccggtttgcgcaataatacggccggattcgttattcaggcttttcgccttaatatcaacaccctcaccgccaattaaaccaccttgttggtttccatatccgaagtattggccgacatagaaaccgaacttgtcgctattggtgctggtgatttttcctgccgcattaagcgctagtttttgatcagcaaccatcatagtatatttagcatcgatatcagctccggactcgatactgatatttttagctttaatgactgaactgtctgtgctaacggtgttggctttgatagtaacatcaccgtttactgaagttatcactcccaatcgactgtagtaattatcgagatcgatatttacaccttctccgccgttaataccggattggctggtattcatgtcgcgaccagtaattgaaacagtcttactgctttcaattttacccatatagttatcaatatcactggtggtttggatactcacatcaccatctgaggcaatttcgccagcccagttgaataagtagtcagcagcaatctcgatgccattacctgagacgatacccaaggattcaccgcccgtggtatcggccgatttgttgtcattattttttactgctttagttgtcgttaattttacagcaccagcactggagcgaatcaagccacttacgttttcaatgtttccagtactttcaacttcgacattgcctgttgaatcaatagtaccgccattattggttaatgatgtatttttcaggccaacatagccagcatgaatctgaccgttgttattatcaaaactacctgattcgatagcaacgatacccgcctcaatacccgcggttttagctttaccagtattggtaaaagtattgccactggtattgacagccagcgtttggccagcagccagtttcccattgctattatcgaacttaccgctattaatatagttgttagtggttgctaatatgttaccaccattgatattacttactttattgcccgcagtatcaatagcaatcattttatcgctgttgatttttcctgcactattttccagaacaccattggtgtttaaagtgatatcaccactggattgtataaccgcgttgttgttaagcagtttaccgttactggtaatcttaataccgctatccccggcagaaatcgtccccaggttacgtacacctacgccactttcggtgctgaccaggctaattttattcgcatacataccaccgagcttagaaacatccacgccataggtacttgcgttaccggttggcgtaacggagtcggtgaccacaccgtcggcgttgatcgcattactccccgcgacgatcttaagctcacttgcagaaagcgctcccttcacaacgatactacgcgccagaatttcggtcggcgattcgctctgaaatccatttacagtaatcgttccgccattaacggaatagccatttaatagcccatcgtcacctatctttggcgtaccagtcgtcaatgtccctttttcagcattgatgaacccaccaccctgagtcgtgatgccattagggttggcaatgattaagtgagcggaatcacctgcaacttccatcatgccattaatggtactggcattcgttgaagtcacttcgttaagaataaccatggcgctgcggtcggtaagatttgggttagccgcaatctgccctgccagcacggactgtgctgcgctggtcgcgttattaaaaataacgccttcggtgccaacattcagcgtgtcatatacgttatgtgaaaggccattactgttcgctttcgcgatattaacaaccggcaccccattggaggcttcagtaacgctgccatttttaatcgaaatttccgcttgcgccattacaggcatcaacagtaataatgatgccgcaatcgggtttaatttaacggactttttttattttcgtgatatttcatatgaacctttctaagatagtattgattgagtgcagccaaaaggaatgccctgcacatgtacaggtgcattctcttctgactattttaagcacgcgttatgcgtacaaatccctgtgaaaagcacgtaaacccatcaaacgttatattcggctctactcagcaaaattatataaatacattgcgaccgcttatacacatctggaacaaagaaagctgattaaattcatacaaaatatgagacatcctttgcccatgcatgaagactaattactttttttaagcgccggtaatccatatattgaccacacgcgaagtccagtatttgagcgctgtgtgataaataatgacatacttcacgccatatccttattccgttacagtttccccgattaacacaatgaataaaaagtgaattatttacctgcataatcaacttccttcacttcatgattaagatcaacaatgtacgcctctccgcccttatcgattattgatcgcgtaatttcctcacgtttatatgaattcatatttatgaattacaatttgattaaaaatagtaatgccagccaactgtaggtagtgaaaaagcaatgtgaaacgcatcgtaaagggtgacgcaggtcagagaagagagggtggagagcgctgaatttgccggagagcggcttaagccttctccggcatcgacatcgacattatgcccgaatggcgttgcgccatcgggctttgcttattaatcgcggaaattcttgaactggaatggctgaccaaggtcgccgccgcgcactaaggccataaccgactgcaaatcatcacgagatttaccagtgacgcgaatttcttcgccctgaatctgtgcctgaactttcagcttgctgtctttaatcagtttgacgattttcttctgaatcgcactttcaatgccctgcttcagcttagcttcgacaaaccaggttttcccactatgtacaaagacttccggtacgtcgagtgaacttccctcaatgccgcgcttgagcagcttcgcgcgaagaatatccaacagctgattgacctggaaatcagactcgctcagtaccttgatggttttactggtttcgttcagctcaaaggtggcttcaacattccgaaaatcaaatcgtgactcgacttcgcggcttgcgttttcgaccgcattacgcgcttcctgaagatcgacttcagagacaatatcgaaagatggcatcttttcctctccttccgtttcttttgcgttgcataatacccacaacgcggcataactcaacttgttatcccggaagcttagctgataacgctatactttagctacaagcgcctgggaagtcgcaggtgaggaggaataatgaaagtaaccgtactgggatgcggtgcactgggacaactatggttaaccgcgctgtataaaaacggacatgaggtccagggctggttacgcgtcccgcaaccattttgtagcgttaatctcattgagactgacggtagtaatttcaacgaatcaatgaccgctaacgatcctgattttctcgctaccagcgatttactactggtgacgctaaaggcatggcaggtttcccaggcggtgaaaaatctggctgctatattaccggcttcagcgcctatcttgttagttcataacggcatgggcacccttgatgaattaaaaagcgttgagcaaccgctgctgctggcatccaccactcatgccgcccgccgtgatggcaacgtcatcattcacgtcgcgcagggaaccacccacatcgggccggcgaaaagttatagagaagattacagcgacctcgccgacatcctgcaaaacgtcctgccggatgtcgcctggcacgacaatattcaccctgctctttggagtaagctggccgtcaactgtgtgattaatcccctgactgcgctgaaagattgtagaaacggcgatctgcgagattttccgcaagagatcaacgcaatctgtcatgaagtcgcagcggtaatgcaacgtgaaggcattcatacaactgcggaaaacctgttattgtatgtaaatcaggtaattgaaagtacggcagaaaatatctcctctatgttgcaggatattcgcgcgcagcggcatacggaaatcgactacatcaccggttttctgcttaatcgcgcccgggcccacggtctgtcagtgccagaaaatgcccgtttatttgaacaggtaaagcgaaaggagaatacttatgagcgcgtcggcactgatttgcctcgcccctggtagtgaagagaccgaagcggtcaccactatcgatttattagcgcgcggcggcgtgaacgtgaccaccgccagcgtcgccagcgatggcaatctgaccattgtctgttcgcgcggcgtgaagctacttgcggatgcgccgctggtcgaagtcgctgatggcgattttgatatcattgttttgcctggcggtattaaaggcgccgagtgctttcgcgacagccctttgctggtagaaaccgtaagacaatttcatttatccgggcgcatcgtggcggcaatctgtgctgcgccagcgatcgtcctgataccacataatctgttccccatcggcaacatcaccggtttcccggcgctgaaagagcaaatccccgccgaacaatggcaggataaacgcgtcgtctgggacccaagggttaatctgttaaccagccaggggccgggaacctctattgatttcgcgttaaaaatgattgacctgttagtcagtcgcgaaaaagcgcatgaggtggcttcgcagttggtcatggctgctggcatctataattactacgaatcctgatggccggtccgcgcagcgggctggttcccccattcttgaggagccgtagcatgtcccctagcgcaaccgattctcgtgacctcgtcatcagccgactactcagcgcccccactgcagccctctggcgcgcgtggaccgacccggcattacttaaaacctggtggtgccctaagccatggtatacagacgttctggcctttgatttgcgtcccggaggggcttttcacaccgtgatgcacggccctgatggtgaacgtagcgataatcccggctgctttcttgaagtcattccgcatcaaaaattagtcatgacctcaatgctgaccgcagactttcggcctgccgtttccccttttgccatgacggctattatcacatttgcggatgaaaacgacggctgtcgttatacggctacggtactgcatgcagataatgaaacccgcgagcaacatgaaaagatgggattttttgagggatggaatatcgttatcgatcagttgaatgcgctggcgatgacgctacgctgatacgccaaccaatagatgtaaaaaagccttcccaaaaggaaggcttttttcataagcgcaggagaattacggacgatacactttcacgttagtaaagccctgctcacgcagatacagcgcctgcagacgactcattaccccacgctcacaccacaacagccaggttttgctctgatcgagattgccgaattgagtgcttaacttatagaacggcagcgaaacaacatcgacgccttccactttcaatggcttatcatcctgctcatcgatagaacgaatatcgaggatggcgtcattcgcaccgaaaccgctgacggtttccacttccaccacgtcctgctgcgtttgctcggcgatgtcgcgaatatcgatgttattcgcttcctcaaccactttctcaagaatactgaaatcgaagttttcttcttccgcttcgatcttcgcttttaccgctttcacggttgggctcttcgagataacgccgcagtattccggcatggtgcgggcaaaatcttcagtgccaatttcacgcgcaagattgatgatgtgttctttatcgtgagaaatcagcggacgcaggatcagcgtgtcggagacattatcgataagacgcaggttggtcagcgtctggctggatacctggcccaacgcctcgccggtcaccagcgcctgcacgccataccgctcagcgattttcgatgccgcacgcaccatcatacgtttgagcaccacgcccatctgaccatcatcgactttttcaagaatttcgccaacgaccggctcaaaattgattgccacgaagcgaacacgatgggagctgccgaagcggttccacaaatagtgcgccacctggcgaacaccgatttcatgcgcggcgccgccgaggttgaagaagcagtagtgtacgcggcagccgcgacgcatcagcatataactggagacgccggagtcgaagccaccggagatgagtgacagcacatcttcctgagtaccaatggggaagccgccaataccttcatagcgccctttcaccagcaacagacgatcgttttcaatttccaggttaaccgtcacgtccgggtcggtgagtttcacgcgcgccgattcgatatgctggttcaggccgccgccaacgtagcgctcaacctcaattgaggtgaattcatgtttaccacgacgcttcacacgcacgcagaagcttttgccttcgagctgttcgcgccacagcggtagcgtctgttcaaaaatgttatgcagagaagtgaaaggtacgtcctctacttccagaatatgatgaatgccagggatacgggtcagcgcatcgcgaataaccggccgctggttttcgtctttcgcgcgaacttcgatatgatcccaatgacgaacgacggcgagcgtctcatcatagtttttgagaacgttacgaatgttcccggttaagattttaataaagcgcaaccgcacagattggcttttgatggtgatttccgggaacaatttaatgataaacttcatggcgacaatagttcgttggcaagcccgacggggctttaagcaaaaaagttgtacaggcgcgatacagcgtctgcatccagggcgcggagtataccatcattgttcgcttttcgcctggcattgcgcattttcgcaaaaatgtatccgtagggtgaatgccgcgagtttgcttaaccgcccgactccgttaccatactgatagccatcgagacataacaagagtctatattcactatgccaaagaaaaatgaggccccggccagctttgagagcgctttaggcgaactcgagcagatcgttaatcgtctggaaagcggctcactaccgctggaagaagcgctcagcgaatttgaacgcggcgtgcagctcgcgcgccagggccagacgaaactgcaacaggccgagcagcgtgtccaaatcctgctggccgatagcgaagatgcgccgttgactccctttacgccggacgctgaataaatggacttcccgcaacaattacagacctgtgtcacccaggccaatgacgcgctgcgccgttttatctctccgctgccatttcagaacactccgctggttgaagccatgcactatggcgcattattaggcggcaaacgcctgcgccctttcctggtttacgccaccggcgagatgttcggcgttagccgttccacgctggatgccccagccgctgccgtcgaatgtattcatgcctactcgctgatgcatgacgatctgccggcgatggacgacgacgatctgcgccgcggtcaacccacgtgccacatcaagtttggcgaagcgaacgctattcttgccggtgacgccctgcaaacgctggcattttctatactgagtgatacgccgatgccggaagtaccggatcgcgaccgtctggcgatggtttccgaactggcccaagctagcggcgtcgccggaatgtgcggcggtcaggcgttggatctcgaggcggaaggtaaacaggtcgatctacaggcgctggagcgaattcaccgccataagaccggagcgcttattcgcgcggcggttcgtcttggcgcactgagcgccggcgagcgtggccgtcaggcgctgccagcactcgatcgctttgcggagaatatcggtctcgccttccaggtgcaggatgacattctggatgtggtaggtgatactgcgactcttggcaaacgtcagggtgccgaccaacagttaggcaaaagtacctatccggcgcttttgggtcttgagcaagcccagcagaaagcgcgcgatctgattgccgacgcccgccaggctttagatgaactggctgcgcaatcgctggataccacggcactggaagcgctcgcgaattacattattcagcgcgataaataaacaataaatgagtctctgatgagttttgatattgccaaatacccaaccctggcgctggtagattccacccaggagttgcgcctgctgccaaaagatagcctgcccaagctttgcgatgagctgcgccgctatcttctggacagcgtgagccgctcaagcggccattttgcctctggccttggcacggttgaactgaccgtggcgctgcactatgtctacaatacgccgttcgaccgcttaatttgggatgtcggccaccaggcttacccgcacaaaattctcactggccgccgcgacaaaatcggtactatccgccagaaaggcggcctgcatccgttcccatggcgcggcgaaagcgaatatgacgtactgagcgttggccactcttctacctctatctccgcgggtattggggtcgctattgccgccgaaaaagaaggcaaacagcggcgcaccgtttgcgtcatcggcgatggggctatcaccgccgggatggcgtttgaggcgatgaaccacgcgggcgatatcaaacctgacatgctggtcgtgctgaacgacaatgaaatgtcgatttcagaaaacgtcggggcgctgaataatcacctggcgcagctgctgtccggcaagttgtattcctcgctgcgtgaaggcggcaaaaaagtcttctccggcgtaccgccgattaaagaactgcttaagcgtaccgaagagcatattaaaggtatggtggtgcccggcacgctgtttgaagagatgggctttaactacatcggcccggtagatggccacgatgtgttgggtctggtcaatacactgaagaatatgcgcgacctgaaagggccgcagttcctgcacatcatgaccaaaaaaggccgcggttatgaaccggccgaaaaagaccccatcaccttccacgcggtaccgaaattcgatcacactagcggcgtgctgccaaaaagcagcggcggcctgccttcctattcgaaaatctttggcgactggctgtgcgaaaccgcggccaaagacgacaaactgatggccgtcaccccggcgatgcgtgaagggtccgggatggtcgagttctcgaaaaaattccccgatcgctattttgatgtcgcgattgccgaacagcacgcggtcacctttgccgccgggatggcgattggcggctataagccgatcgtggcgatctattccaccttcctgcagcgcgcttacgatcaggtgatccatgatgtcgccattcaaaagctgccggtactgtttgctatcgatcgcgctggcatcgtcggcgccgacggtcagacgcatcagggcgcgttcgatctctccttcctgcgctgcatcccggaaatggtgatcatgacccgagcgacgaaaatgaatgtcgccagatgctctataccggatatcactataacgatggccctagcgcggtacgctatccgcgcggaacgggtaccggcgcagagcttgaacccctggcgccgctgccgctcgggaaaggcgtggtgaaaagaaacggcgagaagctggcgatccttaacttcgggactttactgccggaagccgctcaggttgcggaaaaactcaatgcgacgctggtcgatatgcgttttgtgaagccgcttgatgaggcgctgatcctgcagcttgccgccgatcacgaggtgctgatcacccttgaagagaacgccatcatgggcggcgctggcagcggcgtaaacgagcttttgatggcccatcgtcgcgcggtgccggtgctgaatatcggcctgccggacttctttatccctcaggggactcaagaagaagttcgcgccgacctcggccttgatgctgccggcatcgaagccaaaatccacgactggttggcataactgcccataccgctcctgctatgcttaaaggataccttttaaagtagcaggagcgtcttatgcactacattcctcttggcgatacccatcttcgcgtttcccgactctgtctcggctgcatgaccttcggcgaacctgaccgcggcaatcatgcctggacgctccccgaagagagtagccgtccgctgattaaacgtgcgctggaaggcggaattaacttcttcgatacctcgaacaactactccgacggcagcagcgaagaaatccttggccgcgcgctgcgggagtatgctcgccgcgattcggtaatcgtcgccaccaaagtttatcatcaggtcggcgatctgccgcaggggctgtctcgcgcgcaaatcatgcgatctattgacgatagcctacatcgcctgggaatggactatgtcgacctgttgcagatccaccgctgggattacgccacgcccatcgaagagacgctggaggcgctcagcgacgtcgtacgcgccgggaaagcgcgctatatcggcgcatcatcaatgcatgcccgccagttcgcccaggcgctcgccctgcaggaacagaacaattgggcgcgcttcgtcaccatgcaggatcactacaacctgatttatcgtgaagaagaaaacgagatgctgccgctatgccagcgcaaagggattgcggtcatgccgtggagcccgctggcgcgcggccgactaacacgaccatggggagaaacgactgcgcgtctcgtctccgatgaattcggtaaatcgctgtatagcgccaccgacgccaatgatgagcagattgcgcagaagcttgaggaagtggctgaagaattagatgccaaccgcgcgcaggtggcgctggcctggctattaagcaagcccggcgtggctgcgccgattattggcgcctcgcggcaggaacagctggatgagctcctgcatgcagtcgatttaaccctgacgccagaacagatcgacaagctggaggcaccttatcggccccacccaatcgtcggcttcaagtaacgccgcaatttaaaccccggccgcgccggggtgcagatttagagcagacctatcggccagtggtggcctatcaaatacagtacgccggcggagatcaccccggcgacgatatcgtcgaccattatccccattccgccatgaatgttgcggtcaaaccagcggatcggccatggcttccacatatcgaagatacggaaaataacgaaaccggcggccacccactgccagtccatcgtcggtaacgccatcagggtgatccacatcccgacaaactcatcccaaacgatgctgccgtgatcatgggtgcccatatctttagccgtacggtgacaaagatagacgccgatacagatgctcatcatcaccaccagcgaatagagctgccagggcagaaaggtcatcagataccagaacggaatcgccgccagcgacccatcgttcccggcaccaccgggctcagcccactaccgaaaccggtcgccagcaggtgccagggattgcgcatattgaggcggcttttcgcctcgtctctactgcgtgccaaaatgatcgtacccctttaaatccaatctaatcggcttaccctcacgggtaaactgcagtccatctgcttccgccacgatctggccaatacaggtaaagcgcgcgccaagctgaccaatcgcgacatccagcgccccgcggttcagctcgggaacggtaaagcacagttcataatcttcgccgccggcgagcgcccagcgcagcgcctgttcagaatcaacctggcgcagcatggcatcggaatacggcatcgcatcgagatcgatacgcgcgccgcaggcactggccttcaggatatgaccaaggtcagagatcagaccgtctgagagatcgatcgccgaagtggccagatcgcgcagcgcctgcccctgcagtacgcgtggcatcggacgcaaatggcgcgccagcaggtaatcggcatctgctggcgaatcaaccgtcagccggtcctgtaaaagcgccagcccggcggcactatcaccgggcgtgccggtgacataaatccagtcgccaggcctggccccggaacgcttcatcgcgcggcccggcggcacaaagccgtggatacccagcgtcatcgacagcggcccacgggtggtgtcgccgccaatcagctgcatatcgtaatagttaagctggacaaacagactgtcgctaaaggcttcaagccacgcttcgtctgcttccggcaaagtgagggccagcgtcaaccatgccggttccgccccatcgccgccaaatcgctcaggttcaccgccagcgctttatacgccaggtcggcaggatcgatgtcggctaaaaagtggttgcccgccaccagggtgtcggtgctgattgccagcgtttttttctcggggatattcaggagcgcgcagtcatcgccgatgccggtttcaacatcaaggcgggcgcttttaacgcgatcaaaataacgggcaatcagggaaaattcgccgcatgccatacgttatgcctcagcaaagaaaagaataaggccgggttcgcaggatctgatcctgcaaagcccggcctgcagtttactttttgcggggacggattaccggggccgctttatccagcacgccgttgacgaacttgtggctatcttcagcgccgaaggttttcgccagctcgatagcttcgttgatagccactttgtacggcacgtcgtcacgcttcgacagctcaaacagcgcaatacgcagtaccgctttttctacctgacccagctcttccagctggcgtgacagatatggcttcatcagaccgtcgagatacgcgctgttagtcgccactccggacagcagttcacggaaatacagaacgtctacatcttttacatcctgttccgccaggaactggtattcaacatcagcgatgtcgttctgggacaactgccaggagtagagcgcctggacggcacactcacgggcgcggcgacgagcagcaggtttcacggaattccccttacaaaaaatcaggccttgatggctttcaatacgttaatcatttccagcgcggtcagcgcggcttctgcgcctttgttaccggctttggtgccagcgcgttcgatggcttgttcaatactttcagtagtcagaacaccgaaggctaccgggatttcactgtcctgagcgacgtgcgccaggccattgcttgcaccgccagccacatattcaaagtgggcggtaccgccgcgaatcaccgtacccagcgcgattaccgcgtcatatttaccggtttttgccagtgcgccagccgccagcggcagctcatacgcgcctggtacccaaacaacggtgatgttttcatcttttacctgaccaatgcgcttgagggcgtcaatcgcgccttccagcaggctgtcattgataaagttgttgaaacgcgcaatggtgatggcgacgcgagcgtccggggtagcaacgttagcttcaataatgttcatactcttccttcgggttcatgtgccccgcaagggggcggattttatcataatattctgggcgctgcttcctaatattaggaatacatcacgcagtcgttaaatgcaggcagacatcgggtccgacctgacgtatctcgttgaatttgaaatggggggcctggctcagtttctcaagccccggcagcgcgcataaaccgcgcgcgtcactgcctaacagtttaggcgcaatatagacgataagctcatccaccagcccggcctgcagcaaagcgccggccagtgtcggccccgcttccacccaaatgctgttcacctgctgtttaccgagctgcatcattagcagcacgaggtcgagatggccgttatgctccggcaccagcagggtacgcacgttgtcaggccaggaatgttcatcggcatgggtgcgggcaaacagagtttcaccttgctgatgaacaattcgatgctctggcgtgacgcggttttggctatcgatgacgatacgcagcggctgacgcaggttttcctgcggatagagcgcctgcgtatcggcgctcagctcctgccagcgcacggtcagcgccggatcgtccgccagcacggtcgcgctgctggtgagaatagcgtggctctgcgcgcgcaggcgctgcacgtcgcgtcgcgcctgtggcgaggtgatccactgactttcaccgctggccatcgccgtacggccatcaagcgaagcgcccatcttcagctggatccacggaaaaccggtgcgcattcgcttcagaaaacctttattcagcgcttccgcttcattcatcatcagcccatggctgacgtcaatgcctgcctgctgcaggcggtacaggccgcgaccggccacctgtggattcgggtcctgcattgccgctaccacgcgagcaacgcccgcggcgatcagcgcgtcgcagcacggcggcgtgcgaccatggtggctacagggctccagggtgacgtaggcggtcgcgcctttggctttatcgccggccatacgcagcgcgtgcacttcggcgtgcggctcgccggcccgatagtggaagccctcgccgacgatctcgccgtcttttacaatcacacagccgacgttgggattaggatgggtagtaaagcgtccgcgcgcggcaagcttcagcgctcgcgccatgtacatttcgtcctgcatggcttagtcctgtaaacgggcgatttcttcgccgaactctttaatatcttcgaaactgcgatagacggaagcgaagcggatataggcgaccttatcgagcttcttcagctgttccatcaccagattaccgatcattttactcgcgacttcacgctcaccggtgccgcgcagatgggttttaatgtgatttaccgccatttcgacgtcatcggcgctgaccgggcgcttttccagcgctttcaacatcccgctacgcagcttgtcttcgttgaaaggttcgcgcacgtcgttgctttttaccacccgcggcattaccagttccgccacttcaaaagtggtaaagcgttcattgcagaccagacactgccgacgacgacgcacggaggagccttcgccgaccaggcgagaatcgatgactttggtatccacggcgaaacagaaagggcaatgcatggcgcgtcctgacaggtagttaatctgaagggtagtttaccctgaagtcagcggactacaaagaaagagcttttgagacaaaggatctatggtaggtcaattcagtttagctaccattaatcatcctctgtaaacggaatccagaccatgacaagacgttacctacaactggctatcatcggcagcctgttcacccttaccgcctgcgcccagcaaagcgaagttcgtcagatgaacgagagcgtcagtacgctgagcaaagagatgacccagctgaatcagcaaacaataaaaatcacccagcaaaacgcactgaatgctaaatcaactcgcggcgtttatctgctgccggaggccaaaaccccggcgcggctggagagccagatcggtacactacgcatgtcagtgggtagtatcacgccagatggcgacggttcgcgcctgaccttacgcatccagggcgaatctaacgatccgctcccggcctttaccgcaaccgtcgcttccggacagattaccggcaccacccacagctaccaggaagtcaacgtccaggatcaactgattagcgccccagccagcatcctggcgcccagcgatgtggatatcccgctgcgcctgaatgtgacgcctgataaagtcggctttattcgtatccacgatattcaacccgccagcgcgcagtaagcgctcacgccgggcaaaacggcccggcgccccgctttcatccatcgatgttatccatttacaacttttcataagagttcattagaaatcgctcctgaaggcgattttcagtagcattttgtcaagaaatgcatagaatcgtgaacgcaatcgattacgcatgttctggttatgtgaaacaacacgtatttttgtgagcaatgatttctataatagacccccacagaaagacgaaatatttagcaacgcttcggcaattttcttaacgccttttggcttaatttaaacagtggcatcaacatgaaaaaaacattactggcagcgagcgctgttgtggcgctttccgcttctttcaccgctggcgcggcagaaactgaaaaaccgcagtacctgtctgattggtggcaccagagtgtgaacgtggtcggcagctaccacactcgttttggaccgcagatccgtaacgatacctatctggaatacgaagcgtttgctaaaaaagattggtttgatttctacggctatattgatgcgccggtcttcttcggcggcaacagcacggcgaaaggtatctggaacaaaggctccccgctgtttatggagatcgaaccgcgtttctctatcgacaagctgaccaacaccgatctgagcttcgggccgttcaaagagtggtacttcgcgaacaactatatctacgatatgggccgcaacgactctcaggagcagagcacctggtatatgggtctgggtaccgacatcgataccggtctgccgatgagcctgtcgctgaacatctatgccaaataccaatggcaaaactacggcgcgtccaacgaaaacgagtgggacggctaccgcttcaaggtgaaatacttcattccgctgaccgacctgtggggtggttcgctgagctatatcggcttcaccaacttcgattggggttctgacctcggcgacgacaacttctacgatatgaacggtaaacacgcgcgtaccagcaactctatcgcgtccagtcacatcctggcgctgaactacgcgcactggcactactctatcgtcgctcgttacttccataacggcggtcagtgggctgatgatgctaagctgaacttcggcgacggcgatttcaacgttcgctctaccggctggggtggttacttcgttgtcggttacaacttctaattgctgatatagcaagacagcgcccgggccacgttttacgccgtccgggcgtttttatttctcccgcacatcacatctcaccttgcgtaaaaaatcgcttaacgatcggtcggcgcactcgctgaaacgacgctcggtcgcccttacttccaggcaacgatcgagacgaaaattacgataatcattgcgcagttcgcaccaggccaccagcagccagcgctctccccagaaaaacagccccagcggcagcacttcacgccgcgtcacctgaccggattcatcctgatagtgaagctgtaatacctgctgattggaaacggcctgatggataacgtcaaaatgggttttagcataacgatgcgcgccaaggtcgggggcaaacagccgggtttgctccgccttgcgccgccggtctgccggcaaaatcgccagcattttttcctgagctgactccaacgactgcgaaagcgcatcgccgccccaggtctttagtagccgaatcgcggctatcagcgcttcggattctttggtggtcaacatcagcggcggcagatcgtaacccgccagcagacgataaccactcccggcctctccctcaaccgggacgccggaaagcgagaggtcgcggatatcgcgatagacggtacgctccgacacgcccaaccgctccgccagcagcgccgcggtggttagtcgcctgccgcgtaggatctgtacaatctgaaataaacggtcggcgcgtcgggtcatttctcgtttcgctaaatagtcaggttaagccggttgatgcaaacctacgcggttaccttcgctgtcggtaaacagggcgatggtgccaatatcattcggcagcgcaagtgggccaaacacgcacgatccgcccgccgaggcgacgcgatccagtgtggcggcaaggttgtcggtgtgcagataaataatagcgccctgcggcgatggcgcgataccatcaaatttagctaacgcgccgccgggggccgggtcctgatgcgggaagatggccaggtccgcgcaatccatggtttcacgacgcagcgtcacctgcattaccggctcataaaacgcgacggcgcgatccatatctgcgacaggaatttcaaaccagttaatgacgttgttcatacttcctccagctcgttagtgagttcagaagcagtgtacgagagggctcctgacagcatactgtcagcaggtttctggcgggcaaaaaaaatcccggccacaaggccgggattgctttatctcaactgaaccgattacggcagaatagacggctgatccgccccttctttttcgactttctgctggatcagatgctcacgcttcatgcccagtttcaacgccagcgcggacgcgacgtaaatagaagaggccgtaccgatcgatacaccgatcagcatggtcagcgagaagccttccagaatcgggccgccgaagaggaacagcatcaggatcaccatcagggtggtaccggaggtgatcaaggtacggtgcaacgtctgggtcaacgacacgttaaagatttcgtacggcgtaccgcgacggatcttacggaagttttcacggatacggtccgataccacgatactatcgttcaacgagtaaccaattaccgacatcaatgatgcgacgatggtcaggtcaatctcgatatggaacaacgacagcacgcccatggtaatcaccacgtcgtgcgccagtgcgataaccaccctgccgccagtcgccattcaaagcggaagccgacatagataaggatacacaccagcgccgcgatcagcgccagtgcgccggtttgcgcaaggtccgcgcccacgctcgggccaacgaactcaatacgtttcaccgtcgcgctttggctggtcgattcgttaatcacgttaacgactttactgcccagctcctggctgccgttggcatcgtgtaccggcggcatacgcaccatgatgtcccggctgctgccaaagttctgcaattgcggctcctcaaagcccgctttctgcagcgaatcgcgcagctggtccatatcaaccggtttttcgagggtaatttcaatcaccgtaccgccggtgaaatcgagaccccagttaaacccgcggacgccgatgatggcgatcgacacaatcagcagaaaacctgaaatgccgaaggcccagtagtcccagcgcataaagtcccagactttacggccgtggttcaattgttcaacagtatattcctgtgccacaacgcactcctcagatagacagctttttcacgcgcttgccgccgtacagcaggttcacgatggcacgggtgccgacgatagcggtaaacattgaggtcgcgataccgataccggtagtaatcgcaaaccctttaatggcaccggtaccgaccgcgtacaggatgataaccttaattagcgtcgtcacgttggcgtcgaagatggagctaaatgcgcccttataaccttcgtcaatcgcctgctgaacggtacgtccgttgctcagctcttctttgatacgctcgttaatcagtacgttagcatcgaccgccaccgcaagggttaagacgatacccgcgatccccggcatggtcagcgtcgccccaggaatcagggacataataccgacaatcagtaccaggttagcaatcagcgcggaggtcgcaatcagaccgaacttcttatagaagaagatcatgaacaggatagagaccaccagaccggccagacacgcttccaggccctgcttgatgttctgcatacccagagtcgggccgatagtgcgctcttcaacgatctgaatcggcgcaatcagggcgcccgcacgcagcagcagagaaagctgacgcgcttcggtcgggttgctgataccggtgatacggaagctattgccaaggcgagactggatattggcgatgttaatcacctcttcctctttcgcaaggatagcgcgaccgttggcatctttcttaccgctgtctttgtactccacgaacagggtcgccatcggtttaccgatattgtccttggtgaagttagacatgatgttgccacccgcgctatcgagcgagatgttaacctgcggctggttgtactcgtccatgctggaagtggagtcagtgatatggtcgccggtcaggatcacgcgcttatacagcaccaccggacggccttcacgggtatctttcacttccgaatcgcccggtacgcgaccagaagcggcagcggactgatcgacgttggtgttcaccagacggaattccagcgtcgcggtcgcgccaaggatttccttcgcacgcgcggtatcctggatacccggcagttcaaccacgatacggtcggaaccctgacgctgcaccagcggttcggccacgccgagctggtttacacggttacgcagaatgttgatgttctgctgaacggcgtattcacgggcttctttcagacgttcgtcggtcatcaccgctttcagcgcattggtaccctggcttgaaataaccagatcgcgatggcgcgggctgagataagagatagcctgatcgcgcgccgcgctgtcgcggaagacgatgctcagaccgtagttgtcttccttacgcacggtggagtaaggaatgcctttgtcacgcagctcgctgcgcaggctatcgatgttttgttcctgcagtttgcctaatgcggtgtccatgtccacttccatcaggaagtgcacgccgccgcgtaggtcaagacccagcttcatcggctcggcatacatcgccgccagccagcgcggggtcgccggagcaaggtttagcgccacgacgtatttgtcacccagcaggttaaccagcgcttcacgcgctcgcagctgagtgtcggtggtgtcgaagcgcgcaagaattgcgccctcttccagtgccacagacttcgcggtgattttttcttcttgtaaagttttctggacctggatcagcgtttgctcactggcggcgacgccgcgcgcgccagtgatttgaacagccggatcctcaccatacaggttgggaagcgcgtaaatcaggccgacgataatcacgacgaccagcataacgtacttccacaaaggataacggtttaacacggcagttcccttagggaaaatggtaattacagcgccttcatggtgcctttcggcagaacggcagctacgaagtcacgtttgataaccacttcggtggtatcgttcagcgcgatagcgatgtagccgttttccgcgactttagtcacgcgaccaaccagaccgccgttagtcaggacttcatcacctttggcgatggagttcatcagattcttgtgctctttagtacgtttctgctgtgggcgcaggatcatgaagtaaaaaatcagaccgaacaccaccagcatcagaatcagagacattgggctgccctgcgccggcgcgccggttgctgctaccgcatcagaaataaaaaagctcattgaaattccctcattattaaaattaatcaacgttcaaaggaggaacggaacgcccctgacgttggtaaaaatcggtcacgaagctctctaatttaccctcttcgatagccttgcgtaaaccagccattaaacgctgatagtagcgcaggttatgaatggtattgaggcgcgcgcccaatatttcgttgcaacgatcaagatgatgcaagtaagcacgtgaataattgcgacacgtatagcaatcacactcggcatccagcggcgatgtatcgcttttatgcttcgcgttgcggattttcactacgccatcggtcacaaacagatggccgttacgcgcgttgcgcgtcggcataacgcagtcaaacatatcgatgccgcgacgtaccccttccaccaggtcttccggtttcccgacgcccatcaggtatcgcggtttatctgccgggatctgcgggcaaacgtgctccaggatacggtgcatgtcttccttcggctcgccgacagccaaaccgccgacagcgtagccatcaaagccaatctctaccagacctttcaccgagatatctcgtaaatcttcgtaaacgctgccctgaatgatgccaaagagcgcgtttttgttgccgaggccatcgaaacggtcacggctgcgcttggcccagcgcagagacatttccatcgaacgcttagcgtaatcccagtctgccgggtacggcgtacattcgtcgaagatcattacgatatcggaaccgagatcgtactgaatctccatcgatttttccggatcgaggaaaatcggatcgccgttgatcggattgcggaagtgcacgccctgttcggtgatcttacggatatcgccaagactgaagacctggaaaccgccggaatcggtgaggatcggccctttccactgcatgaaatcatgcagatctccgtgcagcttcatgatttcctggcccgggcgcagccacaggtggaaggtgttgccgaggatgatttgcgcgccggtggcttcaacttcttccggcgtcatccctttgacggtgccgtatgtaccaacgggcataaaggctggcgtttcaaccacgccgcgctcaaacaccaaacggccgcgacgcgcgcggccatcggtggtatcaagttcaaatttcattattgctcctgcgtcagaaaaacagtccgacgtttaaatactcgccacggaatgattccgtggctaaaaaatgcgtcaaggcgtcagaaagccggcgtgccggcctttttagggacgctcagaaatagcctgcggattgtacgtgataaacatcgcgtccccgtagctaaaaaagcgatatttttgttctaccgcagccttataggcgttcatggtgtgctgatagccagcgaaagcggagaccaacataatcagtgtggattcagggagatggaagttagtcaccagcgcatcgatgactttgtactgatatcccggatagataaagatctgcgtatcggcaaagaacggctcaatcaggccatttttagccgcctgcgccgcgctttccagcgaacgcacggaagtggtgccgacagcgatgacgcggttaccgcgcgctttcgccgccagaaccgcatcgaccacatcctgcggcacttccgcatattctgagtgcatgatgtgctcttcgatgctatcgacgcgcaccggctggaaggtccccgcgccaacgtgcagcgtcacaaacgccatctcaatgcctttcgcgcgcagtttttccagcagcgggtcgtcaaaatgcaggccggcggtcggcgcagcgaccgcgcccggcttggtgccataaaccgtctggtatagctcgcgatcggcgtcttcgtccgggcggtcgatatacggcggcagcggcatatgaccgatgctgttcaggatatcgagcaccggtcgctcatcgttgaactcaacttcaaacagcgcgccatggcgcgccagcattgtggcgttaatgctttcgtcatcgcctaacagcagctctgccccggcttcggcgctttagaggcgcgaatatgtgccagaatacgtttatcatccagcattcgctcgaccagcacttcaatcttgccgccgctggctttacggccaaacagacgcgccgggatcacccgggtgttgttaaagaccagcagatcgccagggttgagcttatcgagcagatcggtgaaagtaccgtgcgtcagcgctcccgtcggcccgtccagcgacagcaagcggcagctactgcgctccggctgtggatagtgagcaatcagggattcaggtaattcaaaggaaaaatcggtaacgcgcatgacgatgactcagactaaataaagaggcgggtagtctagtgccgggcgggtcttcctgcaaccgttaccctattcaacgctggatataatagcggaatatcatgattaaccagcaagaacggcatgaccgtgtgaaggattaaagtcgatatgaattttctcgcgcatttacacctcgcccaccttgcggatagctcgctgccgggcaacctgctggccgattttgtccgcggtaacccgcagggcgagtatccagcggatgtggttgacggcatttatatgcatcggcgtatagatgtaatgaccgacaatctggcggaagtcaaaacggcgcgcgaatggtttcgccccgagacccgccgcgtcgcgccaatctccctcgacgtcatgtgggatcatttcctgtcgcatcactgggcgcagctttcgccagatctgccgctaaacgagtttgtgcgctacgcccacgcgcaggtagcgcaaattctgccggattcgccgccgcgctttgttaatctcaacgaatatatgtggtccgaacgctggctggaacgttatcaggatatggaattcattcagcgcgtcctgaacggtatggccagccgccgtccgcgcctcgatgcgctgcgtgattcatggtacgaccttgataaccactatgcgcaactggagcagcaattctggcttttttatccgcgaatgatggatcaggcgaaaaagagaacgctgtaaaaccttgcgctttctcacaaaacgattattctgaaagcgctattgaataattatcaataggcaaaatctatctcatcgattgtcagcgccgcattgagttcctgcccgcctctgcctatactggcccgcgttgcgttccaattaaccttagtaataacaggagaatcatatggttctggttactcgtcaggctccggactttaccgctgcagcagtattaggtaacggcgaaatcgttgagaaattcaacttcaaacagcacaccaacggtaaagctaccgtcctgttcttctggccaatggacttcactttcgtttgcccgtctgaactgatcgctttcgacaagcgctacgaagaattccagaaacgcggcgtagaagtggttggcgtttcctttgactccgagttcgttcacaacgcatggcgtaacaccccggtagaccagggcggtatcggcccggttaaatacgcgatggttgccgacatcaaacgtgaaattcagaaagcttacggcatcgagcatccggacgaaggcgttgcgctgcgcggttccttcctgatcgacgctaacggcatcgttcgccaccaggttgttaacgacctgccgctgggccgtaacatcgacgaaatgctgcgtatggttgacgcgctgcagttccacgaagagcacggtgaagtttgcccggctcagtgggaaaaaggaaaagaaggtatggccgcttctccggaaggcgtagctaaatacctgaccgaaaacgtatccagcctgtaatcggctagacgtttccataaaaaggctcgctatggcgagccttttttgtgcctgttatattcgctgtaggcccgataagcgcagcgccaccgggcaaaagtatcagaacgcgaagcaagaacagcctaatacgccccagaaagcctgctcatccgccaccggaatcgacgacttgcgcgcaatatcatgctgatgtccatgcacgccgcagctgccgcagcactggtgcatctgcaccaccgcgccaatcttcgcggccgcaggcggtgccgagcgataatgccctggcacttttaccaccggcgaccactccggcaatactggaattggcggcggcgccagcggcgagaaatgaccggccgcgtacaccaccttgccatcaacgatggttaataccgactcaatacctttaatttcctcttcagcaacgctgaagtagtcttttgacagcaccaccaggtctgccagttgccctttctcaatgcgtccttttttaccctgctcgctggagaaccatgcgctaccggcggtccatagttcaagggcaacgtcgcgcggcaggcggttgttatcgtcgtacatcgccatgccgccgacggtacgcccggaaaccagccagtatagcgcggtccacgggttataactggcgacgcgggtcgcatcggtacccaacccaaccggtacgtccagttccagcattttcgccactggcggcgtatgtttcaccgcttctttgccgtagcgatcgacgaaatattccccctggaaggccatccggtgctgcaccgcgatgccgccgcctaacgccttcacgcgttcaatattacgttcggtgatggtctcggcgtgatcgaagaaccagtgcaggccattaaacggaatatcgcggttcaccttctcgaacacatccagcattcggctaatcgactcatcgtaggtggcatgcaggcggaacggccagcggtgttccaccagatgacgcaccacccgctccagctcatcttccatgccttgcggcagatccggccgcggctgcaggaaatcttcaaaatccgccgccgagaagaccagcatttcaccagcgccgttggcacgatagaaatcggtgccctgccccggcttcagcatgtcggtccaacgctcgaaatcgtccagttcctgcttcggccgctgggtaaagaggttgtaggcgatacgaacggtcatctgctctttggcgtgcagttgctcgataatttcgtaatcttccgggtagttctggaaaccaccgccggcatcgatggcgctggttaatcctaaacggttcagttcgcgcataaactggcgcgtggagttgatctgcagctcaagcggcagcttcggtcctttggccagcgtcgcatacaggatcatggcattaggtttggcgatcagcatcccggtcgggttgccgttgttatcgcgaacgatctcgccgcccgccgggtccggcgtctctttggtatagccaacggctttcagcgccgcgcggttaagcagcgcgcgatcgtacagatgcagcacgaataccggcgtgtcaggcgccgcttcattcagctcttccagcgtcggcatgcggcgttcggcaaactggaattcgctccagccgccgaccaccctcacccactgcggcgacggcgtgcgatcggcctgatcttttagcatacgcagcgcatccgccagcgatggcaccccttcccagcgcagctcgaggttatagttcaggccgccgcgaatcaggtgcaggtgggagtcgttaagacctgggatcaccgtatgacctttaagatcgacaatttgcgtcccctcggcggcgaacgtcattattcgatcgtggcttccggtcgcgagaatttttccatcggcgatggccacggcttccgccagtgggttcgcgcgatcgagcgtatgaatctgaccgtgggtcagaatcagtgtggcagtttgcgacataacgcactcctttaagctggttgagctagttttttttcaaccagccggcaaacagacgggtcacgataggcatccacaaccagaccaccaacgcaaccaccagggcatcgttaatcagatgcagtaacaagcttccccgtaactccggtagcgccatgccggtcagccacggcaccaggttggtacttgggaagatgaccagcagggttatcaggaactgtttccagcgcagcggctggcgaatgttggccgcaggcggggtaaaccagaacgccggttcggtgcggatttcggtacgatcgccatcattgagaaacggcgcgatttccgcgactaattcacgacgggtttccgactgcgtccaggcatagagatgttcaatggtgtcgaagcgaataatcacgctccagagattttgcccggccgccggacggattacgttggcgccaagatggccgggaaactccgccgcaaccggcatgattttccccaaccatgcttcataccgctggccgttttgtggatcgagatgatgactaatgaccagcgtcactgatttctgttgcgccattaagagttccttgcttcaggggaatggcgggatttcccccgccatcagccataaatgacaatacacaaaatcattcatgccgcattgaggcggcaagattgcccttcccgggagctgacatcagtcagtgaccggggcgggcaaacgaagccaacaaagaggcagcttgcaggatgaggtgtattttaggctttacgttccggcgcgccgtgcaccatggtataagcataatccacgcccataccgtaggcgccgctatgttcgcgaaccagatccatcaccgcgtcataagtctctttacgtgaccagtcgcgctggtactccagcaggacctgctgccaggtcaccggtaccgcgccggcctgcaccatacggtcgatggcgcgctcgtgagcgtcaacggaggtaccgccggaggtatcggttaccacgtacacttcataaccttcttccaacgccatcagcgccgggaaggtcaggcacacttcagtccacagcgcggaaataatcagttttttacgtccagtggcttttaccgcattaacaaaaccggcgtcttcccaggagttcatagaagtacgttcaatcggtttcacttcaggatgaaccgccagcagttctggccagatatagccgctgaaacttttggtttcgacagaggtataaataaccggaacgttaaaaatcttgcccgctttagccaacgcgacggtgttatttttcagcgtctggcgatcgatattggccacgccaaaagccatttgcggctgatggtcaataaaaataagagtggaattagacggatcaatcagttcacgaatagacataacacatcctattaatcaattagttaggaagataatacactgccgttgtgctgtgctgattgtggccaataacgcatgatgagtatagtcagtaatttctaacgagttattaaagaaatctttccgttttaattcacttgagtaaaaatagtgaccgtttgaataattaaaaaaagactaatcaaaaaattacgggaaactgttctaatttattcactggaattgaacatcggccttcggtaaaacaacgttattattagactggcggatcgagactaatgcgtttaaaccttgatgtacttttgattcttgatgctctggataggcatggctcgttcgcgctggcggcggagtcgctatttaaaacccctgccgcgctgagctatatgatccaaaaactggaaaacgatctgaacatcagtctgctggaccgttccgggcatcgggcgaaatttaccgataccggcaaaatgatgctggaaaaagggcgcctgctgctcaatgccgccaacgatctggaaaaacaggcgcagttgctgagttccggctgggagcgggatctggcgattgcgctggacgactcttttcctttccaggccctattgccgctgattgaaaaattttacgcgcaatatccgcaaacccggctcaactttacccaccataccctggcgggctcgtgggaagagctgactcacaacggcgcggatattattcttggggcgattaacgaaccgccgacttcggcggaatggtcgtggaaaatgctcggcgcgatggacaacgtgttcgttgtcgcgcccggccacccgctggcggaaacaacccagccgctgaccaacaaacagcttagcctgcatcgcgcggtggttattagcgatagcgcccgctactgtcaaccactgaacagcaacctgctcgatgagcaggagcaaatccgggtagatgatttcgccaccaaagtcgcgctcctgcgcgccggtttgggatgcggattcctgcctcgccacatcgccctcccgtggctggagagcggtgagttgctggagaaaccggtgatttcgagccgtgagaaagatattacctatatggcctggcgtagcggcaataacggtctggctcagcgctggtggcgagaggctatcctcgaagacagctgtctgagccagctctaccgttaacggctacaccacacgctagcggaaatcgcgggcagacttagcacatcatcgtgcatgttgcccgcgccttcttttcgctgccacgttttcccttccagcaatggcgatgcgtcgatcaccacctcgcaggcgtgaccgcggtttatcgcgaccagcacccgctgctgtttgtaaacgcgaacaaagaccaccacgttatcttccgcatagatgacctggcagccgccatagcgcagcgcctgatgccccttacgcaaggtcgtcatacgcttatataacgccaacaagttttcatcctgcagcgccggatcccatggaaagggtttacggcagaagggatcgttgttgccatcgacgccgacttcgtcaccatagtaaatacacggaacgcccggccagcagaacagccagaccaccgccagcggcagtcgcgccacatccttacccagcaaggatttaaaacgcgcggtatcgtggctgtccagttggttaaacatccgcaattgctgctgatgcgacagtccggcgcgatagttgtccatccacgccatacaggtttgcgcatcgatgtgctgcggatcgtaggaaatatcggtattggcgaggaaaccccacagcgggaaggtaaaaccacgatagttcatcgccgcgtcttcggcatcagcctgcagccactggcgcgcgtcgccaaaatgttcgccgaatacaaaagcctccggctgctcccgcttcgccgcctgggtaataccggcgatatggcgcagattattacgcgcgccgccatcctcgcccagcatatgcaccacgtccagccgccagccgtccatactccacggcgcttttaaccagtgccgcaccacgctgtcttcgcccgcatagatttcgttaaccaggctcgatgaacggtagtcaagttttggcagactggcgtaacccagccagttatgcgccaccccttccggcgaaaaattaaaccactcacgccacggtgaatccggctgatggcaggcgccgttgctcgcctgctggtggcgatcgaaccacgggtgcgagtcaccggtatggttaaacacgccgtcgaggatcaggcgcatcccttcacgctgcgtattgtggcgcaggcgcagcagcgcggcatcgccaccgaactgcggatcgacacggcggtaatccgcggtatcgtatttatgtacgctgggcgcgacgaataccggattgagatacagcgcggtcacgccaagctgcttcagataaggaagcttctcgctaataccgtcgaggtcgccgccatagaaggtcgaaccgcccgcctcgccggttaacggctcatcccacgcttttagcacaatattctgaccggccgcatggtggtaataaacctgatcctgcccggcttctcgcgcttcgctacgggcgaaacggtcgggaaaaatttgataaaagacctgatcggcgacccattgcgggccgctatccggcacatcaaccgcaaactgctccagccgcgcgggcggaaaacgctggaagccctgcggcgtaaaccacagctgacggtccgcccatagcagcttaaagctatagcggcggcgcggctggccgttcgtcaggtttatctctccacgccaggcgacgacatcggcgtgtggggattggcgcaggcgctgcatgggcaacgacagctcttcattgtcttcttccgcgcgcagcgtaattcgctgcggcattgtttcgccgcttagccacaatgtgataacgagtcgttcctgctgctctttaataaaaggagcaaccggcaggtgccaggccttcaacatcatcattcctctttttgcgtaatggccacaccttgccacagtgaacaggcgtataactcatcatcaatagaataattggggaggagaaaggaggaggatgtgatttttccgggccgcggcaaagccggacccggaagagcgaagaattactgcgcctgggctaactggcggtcgcggcgggtcttaattttccagccaaccagcagcagtacgatccacgcaaagccgacgtacagcgatatacgggtatccggatggtagccgataagcgcgatgataaagaccaggaacagcaggccgaccacggtggtggccacgccgcccggtactttaaacttcagcgctttcacctcttccggcgacaggcgacgacggaaagcgatttgcgacagcaggatcataatccacacccacaccgtggcgaaggtcgccaacgacgcaatcaccaggaagacgttttccggcatgatgtagttgagatagaccgcaaacagcagcgccacggtcatcaccagcaccgtcacccacggcgtaccgcgacgcgacgttttggcgaacactttcggcgcgctcccctgctcggccattccgtgcagcatacggccaacgccgaatacgtcgctgttaatcgccgatagcgaggcggttaacaccacgaagttcaggattccggcggcaaaggtaattcccatatgctggaaggtcaacacgaacgggctgccgttagtgcccaccaggttccagggatagatagacataatgacgaacagcgtacccacgtagaacaccaggatacgcatcggcaccgaatttatcgcccgtggaatggatttttccggatctttcgcttcaccggcggtgataccgataatctcaatcccgccgtaggcgaacatcaccatctgcagcgacatcaccatccccagccagccgttactgaagaagccgccgttactccataagttatgaataccggttggctgaccgccgttgccgataccccagatgatgatgccgaaaccggcgaggatcatgatgataatcgtggcgactttaaagaatgagaaccagaactccagttcgccgaacaccttcacgctcatcagattgacggcgcagataatcagcaccacgctcagtacccatatccagtgcggcaccgccgggaaccagacgcccatatagataccgaaggcggtcacgtcggcaatcgcgacgatcaggatttcaaaacaataggtccagccggtgatatagccggccagcccgccgaggttctcctgcgcataacgcgagaatgagctggcggaagggttatgcaccgacatttcgcccagcgcgcgcataatgatatacgccgccacgccgccgataatgtatgccaacaatacgctcggacccgccattttaatggcgtctgccgaaccatagaacaggccggtaccaatagcggaaccaagggccataaagcgaatgtgccgggtacttagcccgcgcttaagcttgttactactttccatcgtgttccatgccgtttttctcgtttgtgctttgcgggggcaaaacgcaaaagggaatgaccaaaaaaacaaaaaaccacgggaccttaagtcccgtggttaaacacctgcgtaaagcgtcggttagtgggcttttgagaccaccgggctacccgctgcgcgatcgatgatcgcggccagcacggccatcaccgcggttggcagcaaccatgccagaccttgcgctgccagcggcaggctcgcggtccattgcggcagaatatctgcgaacgccgatgctttaacgccatcaatgataccaaacatcaggctgataaacattgccggcgcgataacgcgggaggaattatgccaccaaccgcgggtaaagcttaataccaccagtgcgatacacggcggataaatagcggttaacaccggaatcgagatctgaatcagatggctgagccccaggttagaaaccgccatggagaacaggccgagaataaacaccagcgaacgatacgacagcggtaaatactgcgcgaagaactcagcgcaggcgcaggtcaggccaaccgcggtgaccagacaggcgataaatatcaatgccgccagcaggaagctgcccgcgccgccgaaggtatgctgcacgtaggagtgcagaatagccgcgccgtttgccgactgatcgaccagcgttgcgctatcggaacccaggcggaacagcgccaggtacagcagcgtcaggcccacaccggccatcagaccagcccagacggtgtagcgagtcagcaatcgggcttcgctaacgccacgggaacgcgcggcattgacgataacgataccgaagaccatcgcccccagcgtgtccatggtcagatagccattgacgaaaccattagagaacggcgcagtacgataggcttccatcgcgtcgctaatcgggccggccggccagataaccgcggccaccgcgagcacgaccagggcgataattttcagcggcgccaggaaattgccgacggtatccagcagtttgcccggatagagggaaaccagaatcaccagcgcgaaatagataacgctatagataagcagcggcagcgcgccgtcgccggtcagtggagcgatccccacttcaaatgaaacggttgcggtacgcggggtcgcgaacagcggcccaaccgccaggtagcacaccacggccagcagaatgcccgcaactttgccgattggcgagctcagacgctcaacgccgccgccgactttcgccagcgcgactaccgttagcaccggcaaacccacggcggtaatcaggaagccaatggctgcggtccagacgtgttcgccggcctgtaagccaaccatcggagggaagataatgttgcctgcgccaacgaacagcgcgaaggtcataaagcccagcgcgatgatgtcgcgagattttaactgatgggtcataaattcattactgcctgtggatgtggtgttgtaaaaaacggaaaaataccgtgccttcctttcgggatgatacagcggccattgcctgtaaactcagcgagatatgctctcgaagcggcgtggaaaagaattgttttttgaattaccacgcaaaagcagtcttaccgggactgcatagggggcaatttaaacgcttataacgttttaaagcaaggtgggatcgtaaaaccagatgattatgctaactatggtttttaacctggattaattgaccataacgacgcaaaacgcgtggcttatcatgcgaacaataaataaccaggcgttcgtttaatacgcagcgcgaagttgactgcaaatgaaaatgaccggccgaagccggtcattggcaaggaaagctgacaaacgccgcctcaggcgccatttttggcaattaaacgttccggcagcaggaagctaaagcgtgttcccttcccgaccgtactttcgatttccagccggctttcgtgatggctaaccgcatgttttacgatagccagccctaaaccgctgccgccggtttgccgggagcgcgccttgtcgacgcggtagaaccgctcggttagccggggtaaatgttcaggcgcaatgcccggaccgttgtcttcaacgctgaacagcgcgccgtgcggcgcccgctgccaggcgacgcggatctcggttcccgctggcgtatggttaacagcgttatacaccagattggaaatcgcgctgcgcaactgctcttcgttgcccatcacctgtagcgtttcgtcgacgctaaagtgcagttgatgcttaccctggctgagggtttgcgcttcgcgctcaaccacccgcagcatcatcgggacgtcgattttatcgttcatcgccagcaccggcgcggcttcaatacgcgagagcgtcagcaactgcttcaccaacccttccatccgctgcgtttgctcacgcatggtatgcagcgctttttcccgcgtcggcccttccagtacctgctcctgcatcatctcaagataaccctgcagtacggtgagcggcgtgcgcagctcgtggctgacgttggcgaaaaagttgcgccgcgcgccttccagctggtgcatttgcgtgacatcgcgcgccaccatcaaccactgtttatcgctataaggcatcacgcgaatttccagatggcgggcgttattgagcaccagattaaggggcttggtgaagtctcggtttttcagatagttagcaaactcagggtaacgcagcaggttgaggatattctgcccgctatcgtccggccagcgtagattaaggatttgttgcgccaggccattacaccagaagatggcgccctcttcggtggtcagcaccaccgcatcgggtaaggattccgccccgctgcgaaagcgcttgatgaggctccccagctcgcggcgacgttttttattacgcatctgcatttgatgcagaccatacagcagcggttcccaactgccgcttcccggcggcggcgtcatactgcgatcgacccacagccaccacgacagacgtaacaaattccagaaatgccaaataagcaatccggtcaccgccgccagtaaaaaccacggcagatgaccgaaaaacgccccgaggatcagggccgggatacaacataagaaaagctcaagcgccagccttttccatgacagccgttccagcacgggtcacactcctgtcaaaattcagaaacgggcggagaaacgatatcccgtgccgcgaaccgtctgtaccatccggtcatgaccgctatgttccagcgctttgcgcaggcggcgaatatgcacatccaccgtccgatcttcaacgtaaacgttagttccccaaacgtgattcagcagctgttcacggctgtatacgcgttccgggtgggtcataaagaagtgtaataatttaaactcggtcggccccatatccagcgggttttcaccggtcatgacgcgatgcgaggagggatccaggctcagccctgcatctcaatcacctcttcgaccgccattggcgaaatacgccgcatcaccgccttaattcgcgccaccagctccttcggcgaaaacggtttggtaatgtaatcatccgcgccggtttccagaccgcgaacgcgatcttcttcttcgccgcgcgccgtcagcatcaccaccggaatatcgcgggtcatcgcttcgcgcttaagctgtttaataaactgtagccccgatccgcccggcaacatccagtcgaggagaatcaaatcgggccagggttcattgagttgattcaccgcactgtcaaaatcttccgcctcgacgggctgaaagccgttttgctccagaacaaagcagaccatttcgcggattggagcttcatcttcaacgaccagaattcttctcgccattatttaccctgtgttttttagccatcagtatagaagtgcgcggccattatgcgtcagatttgtgacagatttatgaaaaaatgaccgtctgatgaatgcggattttgaatgatgacacgcacttaacgcatccagtctcaccgtaatatggcaaaaggaatacgggcggcgggatcaacgttataatggccgcctggcttttatcgcaacggaatttttatgcgcatccttcatacctccgactggcacctcggccagaacttctacagcaaaagccgcgcggacgaacacgccgcctttctcgactggctgctggcgcgcgcgcaggaacacgaggtggatgccattatcgtcgctggcgatatttttgataccggctctccgccgagctacgcccgcgaactgtataaccgttttgtcgttcagctgcagcaaaccggctgccagttggtggtgctggcgggcaatcacgattcggtggcgaccttaaacgagtcgcgcgaaattctcgccttcctgaaaaccaccgtagtcgccaacgccggccacgcgccctttatcttgccgcgtcgcgacggcgcgcccggcgcggtcttctgcccagtgccgtttttgcgcccgcgcgaactggtggtcagccaggctggccactccagcggtgagaaacagcagcagttgctcaccgccatcagcgactactatcagcagcaatatcagcaggcctgcgatctgcgcggcgaacgcgcattaccgatcattgccagcggccacctcaccaccgtcggcgccagcaaaagcgacgcggtccgtgaaatctatatcggcaccctcgacgccttcccggccaaccgcttcccgcccgccgattacatcgcgctcggccatattcatcgcgcccagctggttggcggctgcgagcatattcgctacagcggttcgccgctgccgctgagttttgatgaaaccggaaaaaataaaagcgttaatctggtctcattcagcgagggcaagctcagtgaagtcaccccgctaacggtgccgatcacccagccgctggcggtactgaaaggcgatttcgccagcatcaccgaacagcttcagcagtggcaggatagcgcgcagcagccgccggtatggctggatatcgaaatcaccagcgatgaatacctgcacgatatccaaagaaaaattcagcagcagaccgaatcgctgccggtggaagtgctgctggtgcgccgcagtcgcgcccagcgtgaacgcattctggcgggcgttcagcgggaaacgctaagtgaactgcaggtggaagaggtatttgcccgccgcctggcgctggaaacccttgatgctccgcagcaacagcggctggagcaactgtttacggaaacgctgcatagcctgaatggtgaggaacacctgtgagaatcctgagcctacgcctgaaaaacctcaactcgctgaagggcgaatggaaaatcgactttacctctgaaccattcgccagcaatggattattcgcgattaccgggccgaccggcgccgggaaaaccacgctgttagatgccatctgccttgcgctgtaccacgaaacgccgcgcctgagcagcgtatcgcaatcgcaaaacgatctgatgacccgcgacaccgccgagtgcctggcggaggttgaatttgaggtacggggcaccgcctatcgcgccttctggagccagaaccgcgcccgcaaccagccggatggcaatctacaggcgccgcgcgttgagctggcgcgctgcgacgacgggaaaattcttgctgacaaagtcaaagacaaactggagctgacggcatcgatcaccggcctcgactatgggcgctttacccgttcaatgctgctttcgcaggggcaattcgccgctttcctcaatgccaaaccgaaagagcgcgccgagctgctggaagagctgaccgggactgaaatttacgggcaaatttccgcgcaggtctttgaaaaacataaactcgcccgtattgagctggaaaagctacaggcgcaggcctccggcgtcgtactgcttaacgatgaacaagagcaggcgctacaacaaagtttgcaagtacttactgctgaagaacagcagcagcttgccgaacagacccgtcagcaaaatgccttacagtggctgcgccgccgtcaggagctaaacgcggaagccacccaggcgcaggccgctttgcagcaggcgttactggcgcaggaagccgccgcgccgcagctggcggcgctacaaaccgcgcagccggcagagcaactgcgcccattatggtcgcggctgcaggaacacagtaccgcgctggcgcaaacccgccgtcaggttgaggaagtaaatactcgcttacaggatagcctgcgccgtcgcgccgggatccgccaggcagcccaacaacgtctggctcaacttgaatccagccagcaatcgttgcatgagtggcttaaagcgcacgcgcgattccagcagtggagcacggcgcttgcaggctggaaagccaccttccagcagcttagccgcgacgctcagcaacagcaggcgatacaacagcgcctgcaggatgccagccgaaagctcggcgaattgccggccaccgcgctgactctcgatggagaacaggttagccgcgagctgacacagcatgccgccgcccgcccgctgcgccaacggctctcaaccctccatcgccaactgcagccgctgtacctacgtctgcagcagctacagagcgcggaaaacgcctcacagcaggaaaaagagaagcttgaagccgcgctacaacagcggcgtcaggggtggaaggaaaaaaatcaacagctcagcgatgtaaaagccatctgcgaactggaagcgcgtatcgccgggctggaagccgagcgcgcccgcctgcagccaggcgcgccttgtccactgtgcggttccgaacatcatccggcggtcgcggaataccaggcgctggtgcccggcatcaaccaaacccgccgcgatgcgctggagcgtgacgtgcgacagctggcggaagaaggcgcgcagctgcgcggccagcttgaagcactgcttaaacaacagcaaaaagacgctgacgagaaaacatcgcttctgcagcaggagcaagcgctcacctctcaatggcaagccaccgtcacggaattggcgattacgttgacgccgcatgatgatattgccggctggcttgatagccaacagcagcatgaacagcagctgtatcagcatcaacaacggttggcatggcttgcgcaacagcaggagagtcagcagcagctgcagcagttacagcaggatctcgaacaacgccgtagcgcgctgcatgcagagcttgctgtgtattcgctggagctgccgcctgccgcggaggctgacggctggctggcccagcgtgaagccgaaacccgcggctggcaggcgaaacaagatgaagccgccgcgctgcaggaacagcgccagcagctaacgccgctgctggaaaccctgcctgagtcaacggaagccgccgatcccgcgccgctggagggctggcggcaggtgcatgatgattgcctggcgctacagagtcagtggcaaacgctgggccagcaggaaagccagcagcaggcgctggtgaaggaaagcgaaaagcaattcgccgtcgcgctggccgccagcccgtttgtcgatcgggccgcatttcttgccgctctgcttgacgagccaacccgccagcggctggaacaactcaagcagacgctggaaaaagaggttcagcacaaccaaacgctggccctgcgggcgcagacgtcacttgaacgccatcagcaacagccgcccggcgatactgatattaaccagccgctggagcagccagaaaatatgctggaacaactggcgcgccagttgcgtgaaaacagcgcccgtcagggtgagatccgccagcagttgaagcaaaacagcgataaccaacagcgccagcaatcattacgccagcagatggaacaagccgcgcagcaggtcgaagactgggcctggctgaatgcgctcatcggttcaaaagagggcgataagttccgtaaattcgcccaggggctgacgctggataatctggtgtggctggctaaccagcagctcaaccgcctgcatggccgctatttgctgcaacgcaaagccagcgaggcgctggagctggaagtggtggacacctggcaggccgacgcggtgcgcgatacccgcacgctttccggcggtgaaagcttccttgtgagcctcgcgctggcgctggcgctatctgacctggtgagccataagacgcggattgattcgctattccttgatgaaggattcggcaccctggatagcgaaacgctggataccgcgctggacgcgctcgacgcgcttaacgccagcggcaaagttatcggcgtgattagccacgtcgaggcgatgaaagagcgcatcccggtacagattaaagtgaagaagataaacggtctgggatacagccggttggagaaagcgtttgcggtggagtgatgtcttcccctctccccacaggggagagggaataagatcacagcggccacagccatgccgcgccgcgtacgccgctggaatcgccgtgtatcgcccggcgaatcggcgtttcgcattctccgccgaatacccactgcttcaccagccccggcaccgtttgatacaggcgttcgacgttgctcatcccgccgcctaacacaatgacatccggatcgaggatattcactacgtgcgccagcgatttcgccagccgctgctcgtagcggctcagcgccagttcggccttttcgtcaccgtcccccaccaggcgcataatctcgctgccggttaacggttttccacttagccgctgatagtcggtggcgaaaccggtgccggaaataaaggtttcaatacacccctgcttgccacagtaacaagggacttgttggcggtagagcagctcatcttcatccatccacggcagcgggttgtgccccattcgccggcggtgccattgccgccgatatgcgcgcgcccgttcaacgccacccccgcgccgcagccggtaccgataattaccgcaaacacggtttgcgcacccgcggccgcgccatcgaccgcctccgaaaccgccaggcagttggcgtcgttggcaagccggacctcacgattgaggcgcaggctgaggtctttatcgaagggctggccgttcagccaggtcgaattggcgtttttcaccaccccgctatacggcgaaatcgagccggggatgcccataccgacggtgccgcgctgcccggtcgcctgctcggccatctccaccagcgaggcaatcgtctcgatagtctggcgataatcctcccgcggggttggcaagcggtggcgaaataactgctggccctgctcactcagggcgatgacttctgtttttgttccacctaaatcaataccaatacgcacagtctgctcctcaccccgattaacaatgcaagcatagcgacaattcgctatcatgcccgcctgatttaacgacaaagccgtggaaattatcatgctgtggttcaaaaatttaatggtttaccgtctgagccgcgatatcgaattgcgcgccgaagagatggaaaaacagctggccgagctgacatttaccccttgtggcagccaggatatggcgaaaaccggttgggtatcgccgatgggatcgcacagcgacgcgctgacgcatacggcaaacggccagatcgttatctgcgcccgtaaagaagaaaagatcctgccatcgccggtgatcaaacaggcgctggaagcgaagatcctcaagctcgaagccgatcagggccgcaagctgaaaaaaacggaaaaagattcgctgaaagatgaagttcttcactcgctgctgccgcgcgcctttagtcgcttcagccagacgatgatgtggatcgataccgtcaacggcctgatcatggtggactgcgccagcgcgaagaaagcggaagatacgctggcgctgctgcgtaaaacgctgggctcgctgccggtggtgccgctgacgctggaaaatccgatcgagctgacgctgaccgaatgggtgcgctccggtagcgtggctcagggcttccagctgcttgacgaagccgaattgaaagcgatgctggaagatggcggcgtgatccgcgcgaagaaacaggatctggtgagcgatgagatcgctgtacatatcgaagcgggtaaagtggtcaccaaactggcgctcgactggcagcagcgtatccagtttgtgatctgcgacgacgcatcgattaaacgtctgaagttctgcgacgaattacgtgaccagaatgaagatattgaccgcgaagattttgcgcagcgttttgacgccgactttatcttgatgaccggcgaactggcggcattgattcaaagtctggtagaaggactgggcggcgaagcccagcgctaacgcgccaccttcctgccgggcccggaaaatggacgcggcaggaaggcgcttaaattacagataacggcacaggtaggaagtcggttccgccacctgcaggtggaattcgctattacccggcacgttaaacacttcgcctgccgcgtaaaccttccattcagtttcacccggcaacagcacgttcaacgcgccgctgaccacggtcatctcttccggctgggcggtgccaaaggcgtattcaccctctgccatcaccccaacgctggcgcggccggtactgctgctggtgaagccgatagatttcactttccctgaaaaatactcattgctttgaagcataaacaagaccttatcatcgttggttgaagcttcaatatagggggcgctccttgcccctgtcacgcaaaattaatcgataacgtcgggttaaactaatagttctgccgccagtcgcgaaaccagcacatttgataataataccgggacatccagcgccttttgtaataggtcgcggtgatgctgatggtagccaagacagtcgagcaccagtacatccgcaccctgttcaactaaacctcttcctgcatccagcagatcgctgtcgctgccgcccatcgggttcgccagcgcataataaggcgtattttctaaagtgagccacttttgccgctgtagaggcaagacttcttcaacgggtacaatcacgccaacctgatggccatcaacgatcgaggccaccagcggcggaataatccgttcaggctcaagaaggatagcgttgtgcgtcgccaggccgctcaactgttcggaactgagaagaagaatgacatcatattcctgccgatccagcatctcgataacgcagcgcagatcgcgctccaccttttggcgggagacttccaccagttggttatcattaagtaaggtcagcagcccctggtcgccggattccacggcataatcttccataacgtcttcacgcgtcattttacctaacaggctaatatgggtgatctgctcttccctgatatgttcggttaacagcggcaaaacttccgccaccggcgccacgccaatggtcaaaattgccatcgttgcactcatatcatgtaccttttcactaccactgcttcaacacaggcttttcacacacgacattcgcccccctggtgagtaaaaatcaaccgtcgagaagcgtagcagctcagcggcgctgcggaatgtaaagattccggaagcttcagagtcgctcctgaaaaatccgtgtgttaggtattcattagtaccattgataaattaaaaatgtgagctgggcccggtattgccatcatcatgacgcaaaccgggccgggggattaggttttctcgggatcttcgtaacgccgtttggcgtctaacgcttcctgctcggagggatgttcgctgatcagcgaatctggtgtcgggtaatccgcacgcagctgataccaggtgaccgtctgacccgcggcgcctttttcgacggcgacaacgcgggcttgtctcggataagggggtctgtttggcattgttcttcctttttcggctgtcagaacaattaagtataggccccgctttctcccctgacccaggtaaaatcctaacttaccgtcacatcgcacagcatggtcataatctgttcaaccaccgcatccggcgtcgcggtggcatctacggtatgatgggcggtttcacggtacagggcttcccgctgcgccagcacttcgccgacttcctcacggacaggcttaccggtcagcgttgggcgttgttccgcctgcgggtatgcttccagacgctcaatcaaggcgttaacagaagcctgcagataaatcacaatgccgttttcacgcataaacagacgattgcgttcagcaagaataattcctccgccggtcgcaataaccgtatccggcagcgtaacggccttcagcgacagcgtctccagttcacgaaaacgctcccagccctcttgctgcacgatttctgctaccgtgcgcttctcatgagcctgtaaacgatgatcggtatcggaaaactggaaatgctgcgcgcgcgccagggcatggccgatcgtcgttttaccgcagcctcgcggcccgatgagaaaaattggttgtgtcattaccgaagccccctggttccgcgtgtcgcggagaaataaaggcgaaaagtacgccatgatacctgcaaatgcctgccacgataaccgtaaaataatcgttacattttttagggaaccctatttaccacagagtttgaatggattccgcatgtaaacttatcattgcatttagtgttatgccagctttacttaaagacgaaggattattttttatccatcgtttgccgtaaacggtaacacatttctgcacagctttacgctgcaacatatttacaacaccggcagaccgtcgcactctgacggtaaatgacccgtgtgacagaggaatgtatcatgcaatctgaagaacaacgccttattgatggcctgttttcccgtttaaaagaggccgagacgcacagcgcatcgcgcgacgccagcgccgaggagcggattgcccagcacgtaacccaacagccggcagctccatactatatggcgcaaactatcctgattcaggaagcggctatcaaacagcttaacgaccgcattcaggcgctggaggcgcaggttagccagctgcaggcggcaaaaccgagcagcggcgggttcctgtcgggcctgttcggcggcggccagtcccgcggcgccgatccgattccaggagccgagcaatatggccgcccgcagacgaataacgcacaaccgcagtatgcgccacagcaaaactatgccccgcaggcggcaggccgcagcggcggcggctttatggcgggcgcactacaaaccgcggccggggtggcaggcggcgtggtgctgggcaatatgctgaccaatatgttcagtggttcacatccgcaggagattgtgaacatcatcgatgaacagcagccgcagcagcaacaagatgtcagcccggcgctggataataaggccgctgaggatccgttccgccagcaggacgaccctttcctggcggacaataataccttcgactccgatttcgacgccggcttcggcaatgacgatgatttcggtagcgatgatgacagctgggtttaatcctgctggcgtttaaccgcaagcagccacttctccagctcggcggcgaataactgccgatcgcgctgcgataaactatccgggccgccggtctgtacgccgctggcccgcatcgtctccataaaatcacgcatcgtcaggcgctcgcgaatggtcgcctcactgtagcgctcgccgcgcggattcagcgccgcgcctcctttcgccagcacttccgccgccagcgggatgtcagcggtgatcaccaaatcgcccggttcacagagacggacaatctcgttatcggcaacatcaaaaccctgcgccacccgtagcgcgcggacgtaacgcgacggcggaacccgcagcgactggttggcgaccagcgtcagcggcgtctgcgtgcgttcggcggcgcggaacaaaatttctttaatgacattcggacacgcgtccgcatctacccaaatcgccatttcggctcctgtcgtcggcaaaggttgcgacattgtcgcctgcttttctcccccagaaaagcgccaggatgataagctagtgagatcgtaacgaaaaatgcagaggggaaaggtaatggataagaaaattggctttatcggctgcggcaacatgggtaaagccatactcggcggcctgatcgccagcggacaagtgcaaccggcgcaaatctgggtctataccccatcgccggacaaagttgccgccctgcatgaccagtacggtattaatgcggcggaaagcgcgcaggaagtcgctcaggtcgccgatatcgttttcggcgcggtgaagccggggatcatgaccaaggtattaagcgatatcgcttccagtctgaacaaagattcgctggtggtctcgatagccgcgggcgtcacgctggatcagctggcgcgcgcgctgggccacgatcgcaaaattattcgcgccatgccaaacaccccgtcgttggtgaacgccgggatgacctccgtgacgccaaacgcgctggtcagcacggaggagatcgccgaggtattaaccattttccgctgcttcggccaggcggaaaccatcgccgaaccgatgattcatccggtggttggcgtcagcggttccgcgccggcttacgtctttatgtttatcgaagccatggccgatgccgccgttctcggcggtatgccgcgcgcgcaggcctacaaattcgccgcgcaggcggtgatggggtcagcgaagatggtgctggaaagcggcgaacatccgggcgcgctgaaagatatggtctgctcgccaggcggcaccaccattgaagcggttcgcgtactggaagagaaaggtttccgttccgccgttatcgaagcgatggcgaagtgtatggaaaaatcagagcaactgagccgttcctgataagcctgaaagagactacgggtgaggcgccgccccacccgtcatcttatttcttcaggcaggtactcataaacttattacgatcgtcacccttcagcgatttcgacgacgcttctttgctacaagcgctcatcttctgctgttgaggcgtcagcgtcttgccggccgctggcgcatccttcttcaggcaattgctcataaaggttttacgttcatcacccttcagcgactttgacgccgcttcggtattacaggcgctcattttctgctgctgaggcgttaacgttttatctgcggcactcaccgcggcaacaaagaccaaaccaaaaagtagggttaccagaaatgttattttcatcacaccatccctctgttagtggatctctgtaagtctggtcgctatcagcaaaaaaaccagccggtaacgtaaattcatcaccggccgcgggttatttcagacccagcgcgtctttcatggtgtaaaacagatcggtctggtctgtgagccccaccacgttgcccgcatgcggtccgtaagcggcaatacgcaattgggtgccggtgtgctccatcgactcttcttcagagttgccatagctcatcaccattaccgcaccatctttggtcgtcagcgcctgggtcaggcccggagctttcgtgtctgccgggataatctggctggagtgggcgtgatcggcggtaacgatcaccagggtattgccctcttttttggcaaattccagcgctttctgtaccgcttcatcgaggtcgacggtttcgccaatctggccgcaagggtttgccgcgtggtcctgtttatcgatagacgctccctcaacctgcaggaagaatcccttttcgttgtggctcaggagattaatcgctttttcggtcatctgcgccagcgtcggtacggaagcatcgcgtttcgggtttggcgtacaggttaccggcggtttgtcgatgttgccgtgataagaggctttcgggccttcccaccgcaccggcatattgccgtcggagaacagaccgagcagcggtttaccctgattagcttcgctgatagcggcgagagaggcggcgtcggtcacaatctgatagccgcgagcgatcgcctgctcatgcagggttttcccctgccactcccccgcggtcgccgtttcagcaaaggtcttcgccccgccgcctaaggagacatccggacgggcattcaggagttgttcggtgatagagcccttgccgcctttttccagcgcgttgctggcgcatttttcactggtcacgctgggaccatagcatttacgcgaggtcacgtgggccacctgcgccgccggcgtcgcatcctgcagttcggccgtcgagacgttgccggtggcaagacctgccgctttcgccagttcaaggatggtctgatgatctttttcgtggatatcgacgcccagcgcgccgttatagcttttcacgccagtagtccacgcggttgccgaagcggcggaatccgtcacgtaatccggtttgccggtttttttatccagagaataatgggtgtactggcccgtcagcggcagggcatcaatacctttaaagaaaccgccggcgccttcggcataatttcgtgcggcggtaatttctgaatcgcccatgccatcgccaatgagcaaaataatatttttcgccggcttattgattaaagaagcgcgcagcgcttcggtctgatcgcccgttaatcggcgcgcgccgcctggggtcgtgatatcgccctgcgccgcgcgattttccaacaccggcgaagatgttgtttgcgcatgaataaccggggagtcagcagcggtaacagggcaataaagagggcagaatatttcactttgtcgtctccatgtaaaaaatacttaaaaaacaaaacgagggagactttataaaagtggtgtgacagaaaaatgacagcatccttaccagtcacaagattagttacgaggatgccggagcagcttttttatatattgctgcagaagctgggtgtcacgctcgtccaccagcggcccgggctttacctgctccatggcggtttcgatatcctgaatcaaacgttgctgcgcatcctcagccatatggcgcagcagcgcggtgacgacaatttccagcgcttcaacctgtaccgtcagctcctttgcctcttcttctttttgcgccagattgaccaatagctcggcaatgagatttctcattacgcattatccttaagcgatatccataatggcctagttatgtcatacatcgacatatcgataccagaattattttcaaataatagggttattcctgcaataatattcagcgaaacgtttttattaccgcctggcaacaaaggcaaagcccctattattaatagccagaagataattctataaccaaaattaatagtaaataataaaatggaatatgcgtcgcactgtttaaggataaccaaaagtaatagttaacggtgctggcagataactaatataaggcacccttatgggtgccttatatcctttatttaaacggccgcgcggcggctacggcgtaacataatcgccagttgccagatattaatcaggacaatcaacgcggtagcaataaacacccagcggaaacccgccattgccgacaccgaagcgccaatgagcggcccggcgacatttccgagatacataaacgactggttatagccgaaaatacgcccggtgacgttatcgctacagtatttcaagagcagcgtctggaccgccggtagcatcgcgccatcggcaaagcccagcaggaagcgcaataccccgagctgcagcggcgaagtcacgaacgacatcgcgaagaacatcaccacagcgcagcataacgtcgccagcagtatacgcgacgtcccgatgcgatcgccgagttttcccaggcgaggcgcagaaatcagcgccgaaatccccggtacggcggcaatcatccccgcgagaaacgcgatgttgttactatccggtgccatcgacttgataaataacgccagaatcggcccgattgagccgttacacaactggataaccagggtggtgaaaaacaggctaatcaccagccccggatgggtcagtgaagcaaagaccgctttaccgctcagacgttcggctttgctcacttgcggccgggcgccctctttaatcagaaataaggtcacgaggaagctgactgtcagtaaaatagcggtaatgaaaaataccgcccgcaggccgacgtggtcggcaagaaaaccgccaagcagcgggccgccgatcacgccgcttatctgcgccgtcgagagcgtactcagcgcccaaccactgcgttcacgcggtacctgcgaggccaccagcgccatggcgttgggtatatagcctgaggttagccccattaccgcacgcaaaataaatagctgccaaacgttggtcgcaaaagcctgcagcaaaatcgctatcgccatgccaagggaggcgcgcagcagcatgagtttgcgccctttgcggtctgccaggctcccccacatcggcgagacaatcgccgacaccaggaaggtgacgctaaaggtcaagcccgaccacatcgacagcgcttcatgtgaggtgacgcccaactgtgagacatacagcggtaagaagggcagaatttgactaatggcgagtccggtgaaaaagcagccgaaccagacagaaatgagattaaccttccaggattccataactacgcgtattcattagtgtttcgttaattattatctagcttagcaatttccgtctccgcacgtagcaccagagatgcgcatgccgcgagtttggtgttttatcgccctgaccgcggagtagacaaacataatcgaagataaccgcattctcgtcagtgtgatgtgctgaggcacatcggcgcatgcgcagcatttaaccctctgcagcatagggtaaagattcaggcagccatctcgctaaaacacatgctatgttatgtgttttgatgtaatcaggatggaagttgaaatggctaaaatgagggttgggatcgtttttggcggtaagtcggcagaacatgaagtgtcgctgcagtcagccaaaaatatcgtcgaagcaattgataaaacgcgctttgatgttgtgctgctgggaatcgataaacaggggctttggcatatcaacgatgccagcaactatctgctgaacccgcaggatcccgcccatatcgcgctgcgcccatcggacgtgacgctggcgcaaattcccggtcgcgatgcccatcagttgatcaacgccgatagcggccagccgctggcggccatcgacgttatcttcccgattgttcacggcacccttggcgaagatggttcgctgcaggggatgctgcgaatggcgaatttgccgttcgtcggatccgatgtgctgggctccgccgcctgcatggataaagacgttactaaacgtctgcttcgcgatgccggtctgtcaattgcgccgttcatcactctgactcgcgccaaccgccagcagttcagctttgccgatgtcaaagcgaagctggggttaccgctgttcgtgaagccagcgaaccagggttcttccgtcggcgtcagcaaagtgaagagcgaagaagagtacctgcaggccgtcgcgttagcctttgaattcgaccataaagtggtggttgaacaagggattaagggccgtgaaatcgagtgcgcggtgctgggcaatgattatcctcaggccagcacctgcggggagatcgtactcaatagcgaattctatgcctacgataccaagtacattgatgataaaggcgcgcaggtggtggttccggcagccatcgccccggagatcaacgacaaaatccgcgatatcgccgtccgcgcttatcaaacgctcggctgcagcggaatggcccgcgttgacgtcttcctgacggaagataacgaggtggtgatcaacgaaatcaacacgctgccgggctttaccaacatcagtatgtatccgaagctgtggcaggccagcggcctggattacaccagtttgattagccgcctgatcgagctggcgctggagcgccacgccgccgatcgcgcgctgaaaacctcaatgaactaagcatctttcccgggtagcggcgtaccgccttacccgggctaccgcgtcgttattacgcctcttcagccggacggcggcgaataacaaatcccgccagccagaagctcactacccacgtcgccagaccgacggcgtatgactgccagccctgcgcgtcaaaccccagcagccccaccacgccattgagaataaaaattaaccccagcgcgaacgcgtagtagtgccagtcacggcggattttgtcggtcagcttcataacgactcctgcagaaaaaaaacatcatcgcatagccgcccgccgcgccaacaagattgttcgcacaatgcgaagccgctctcccttttgtgcaatgcgggctcgccgacagttttgtcaaaacaggattattcctggcagaaattaccagcaatctgatacagggaaacgcccggcgctgccagaattcctgtctatagagctgggggaaaaaccagcggaacaggtgttgcggaggtttatatggctgaatttacgttttcgaagacgctgatggggagcaacaaaaagaaggtatcgatcaccagcggcaatattgcctacgcgctttttgttctgctgtgcatctgggccggcgcgcaaatgctgagcatgctggtacacgcgccaggcgtattcgaacatcttattcagattcaggataccaaccgcccgcgtattgaaattgggctcggcgtcggtaccctgttcggtttaattccgtttctgtttggtagcctgctggtcggcgcgctggggcttatcctgcgctggtaccataaccgttaacgacgcgccatacagctggcgcggcgatcgtcgacccgcttagcaaaccacgcggtggtgagattacgggtgattttcgggctctcaagctggatccctggcaacatttcacgcggcagacttttaccggcctttttctcagcgattttaaatattttcttatacaaatcgctctcttcaaacgccaggctatcacccttcttcagttgacgatggatatcgccatcgctcatccccaactgcccggctaaacggcgcaccgccagctcggtggtacccggctcatcgctgtcatagcggacgagatcgccatccagcgccagcttaacgccggtggctttaaccaccgcattctggaaggcggcgttacggctggcataccaaccggcattgaaatcagcaaagcggtacagcggcacgctgtagttagccgggtagttgagcagatgataggtgccgaaccacaacccgccgcgcaggctgaagacttcctggcgcacggtgccgtccattttccatgggtaaccgtcggtatgctgctgggcaaaggcgatgcttacctgcattggcccgccggtatgcaccgggttaagagagccgaacagcttctggcccatcggcaccatgccaatgaagtcatcaaaaatcgcgcttagctgtttttccgttttgacgttatcgaggcgctcgctgtaacttttaccgttcggcgaggtgattttcagcgcggtatgcaccagaaataccgggatatgcattttttccgcccggcggtcaatttcctgccaggcgattttattcaggcccggcaccgccggatcggccttatagtttgattcctgctgcgcgaccgccagcaccgaacagacgttttcttccgtcggcgccagcttctggctgtcaaaggttttggcaatcgcctgcgcccaggcctcgcggtctttgacgctggcgggcattttttgccgcaccacggcggcgacatccaccggcttctcgccttctttcaatttaggcgcctgctggctggtacaagcgctcagcaccaacccggccagcagcgtaaaagagagtgaaacaccgcgagaaacctgcgccataaaccttccttgcattcattaattaacggttgaagagacttcctgcagccctttgttatccagttcgcgctcaaagctgcgcagacgtttatagatggacatcagttccaccagcgtggtccacgaactaatcagatactggaacgagccgcgtacctggccgaacacgttggtaatctgggtcatcaggccgagcgtaatcgtaccggcgacaatcgacggaaacagcaggaacaagccgaaaacgttatccacctgcaggtaaagaatacgggcgatattgaaatacatatagtggaaatagagacggaagtagttgtggcgcaccgcgttgaacagttcgcgcacggtcggcggcgtggcgcggttggcgtcatcctcgccatacaccagctctttacgataggcggcttctacccgctggtttttaaattgcaggcccggcagcttgatcccgaccaccgccagcagcccggtacccatcagcgaccacacgatagcggcgatcaccagtccatacggtaaatgaccaacgatcggcaggtccggcacatgcgccgacagcgaaaccagcaccggtaggaaagcaatcagcgtcattaccgcattaataaagcttacgcccatgtcttcaagcgtcgcggcgaagcgcatggtgtcttcctgcacacgctgagctgcaccttcaatatggcgcaaatgctgccagtgttccatatagtgttcgttcatcgcggtacgccagcggaacacatagtggctgacgaagaagttattcagcacgccaatcaccaccgcaatcagcgcgatgccgagaaaaatgccaatctcgtggtagaactgattgatgctgaccttgtgcggcgtggccagcgcgctctgaattaaatcatagaacggcgcataccaggcgttgatcgccaccccaacttccaccaaaaaccaggtgacaaaaataatcaacgaggtgccgagaatcgaccagtattgccagcgatgcgggctatagataaaccagaacagcgcaaaggcgccgacacagaacaggtaatacgcgtaaaacaccaaatagttgagcgaccagaaccgcgccgcgctgatggcgacatcctgcgatgcgccggttacccgcagcagccagtcgccgccgcccgcctgccaaaagatcaccgccagcagcgaccagataaaggcagaaataaaaaacggccccggtttggggaaaaaagctttaaacatcgtactctcctgctaacttcttatcgttctgtttttgctgtgtaccacacgtacgcccgccgcaacgcgcggcggcgaagtaaagcggacccatgatgagaccggatatcagcgacttagttcgtctgccattcggcaagaattgtttctacgggtttcacgcgtaaaggattatcgggaagggtgaaagtccgccacacctcgttatagtgagcgatcagcgttttggcttcggcggcggcgcggttggcggtggtatgggcatcttcggcgatggtgatggcgtagccgcggctggcgccgtttttgatagtggtatcgacgcaataatcggtcgcgcaaccgcagataacaaaagcgtgagttccgttctcgcgcagcacctgttcaagctcggttttataaaacgcatcgcaggccgttttggtaacgtaacgcgccccggcgggttgcgccagttcaggcagcagcgcaaacccctcgcttccctcttccagcccacccgcttcagcgtgctgaatgaaaataacgctctcggcggcgtgaatcaggcgattgatttgcgctacgcagcgttcgcgatcgatacgcggcgtctcgaatacgccgttttgcatatccactaccatcagaacccgttgagatgccatcaccactctcttttataagatgaataagagcttaatcatacgcgtcaggcggaaaagcagatatctgaaagcggaaaaaagtcatttttacgcaccgttacgcttttctgtgaaatattgtcgttattcccactttgttcgctgcgacttcgtagtataaatacagtgtatattcccctaataaacgatggatgcctccgttgaaacgtagtttgctcatttttgctgcgctgtgcgcggcgtcgtggacctcagcccaggcggttcagccgagcgttgatccggtatttacttctgatgtggtcgaccgcttcgccgaacatatttattacggcagcggcgccaccgggatggcgatggtggttatcgacggcaaccagcgcgtattccgcagcttcggcgaaacacgccccggtaacaatcagcatccacaattggattccgttatccgtatcgcctctctgagcaagctgatgaccagtgaaatgctggtgaaattgctcgatcagggagtggttaagcttgacgatccgctgagcaaatacgcgccgcctggcgcgcgcgtgccaacctaccagggtgtaccgattacgttagtcaacctggcgacccacaccagcgccctgccgcgcgagcagcccggcggcgcggcgcatcgcccggtatttgtctggccgacccgccagcagcgctggaactggctgtcgacggctacgcttaaaaccacgccgggctcgcaggcggcctattccaaccttgccttcgacctgctggccgatgcgctatcgaccgccgccggtaagccctacccgcagctgtttgaagaacaaatcacccgcccgctcggcatgaaggacaccaccttcacgccatcgccggaccagtgtcagcgcctgatggtggcagagaaaggcgccagcccgtgtaataacaccctcgcggccatcggcagcggcggcgtgtattcgacgccgggcgatatgatgcgctggatgcagcagttcctctcttcagatttctatactcgcggccagcaggccgatcgcatgcagacgctgatttatcaacgtacccagctcaccagagtgatcggcatggatgtaccgggtaaagccgatgcgctgggtctgggctgggtttacatgaagcccaaaaacggccatccgggcattattcagaaaaccggcggcggcggcggatttattacctatatggcgatgaacccgcaggctaacgtcggggtcttcgtggtggttacccgttctgcgttgacccgtttcagcgccatgagcgacggcgtcaacgacctcgtcagcgccttaagcggcgtgcagccgaatatggaaaccgccagccagtaatcgttgcgggatgttttgccactgattgttaaggatcgttttggcgaaacatcccgctgtcgtttgcggtacactaccttctttcatttcacaaaatcaggcaaaccatgacagatttaatcactcgcccacgccgcctgcgtcaatccgcctcgctgcgcgccatgtttgaagagacaacactgagtttgaacgacctggtgttgccgatctttgttgaagaagaaattgacgattacaaagccatcgaagcgatgcctggcgtcatgcgtattccggaaaaacatctggcgcgcgaaattgagcgcatcgccaacgctggtatccgttcagtgatgacctttggtatttcccaccataccgacgcgaccggtagcgatacctggaatgaaaacggtctggtggcgcgcatgacccgtatcgccaaacaggcggtgccggaaatgatcgtcatgtccgatacctgcttctgcgaatacacctcgcacggccactgcggcgtgctgtgcgagcacggcgtcgataacgatgcgaccctggaaaacctcggtaagcaggcggtggtcgctgcggccgccggcgctgatttcatcgcgccatctgccgcgatggacggtcaggtgcaggcgatccgccgttcgctggatgccgcaggcttcagcaataccgccattatgtcctactccaccaagttcgcgtcatcgttctacggcccgttccgtgaagccgccggcaccgcgctgaaaggcgatcgtaagacctaccagatgagcccgatgaaccgtcgcgaagcaattcgcgagtcgctgctcgatgaagcccagggcgcggactgcctgatggtgaaaccggctggcgcctatctggatatcctgcgtgatatccgcgagcgcaccgacctgccgctcggcgcttatcaggtcagcggcgagtacgcgatgatcaaatttgccgcgcaggctggcgctatcgacgaagagaaagtggtgctggaaagccttggcgcaattaaacgcgcgggcgcggacctgatcttcagctatttcgccctcgatctggccgagaaaaaaatcctgcgttaaacctaccctctccccggtagcgctgacgcttaccggggctaccaaccaaatgccaaatcgtagatattattatcagtttgcaactgtttcattcctggagaaacggttgttctatgctgtttccgggcacattgcgctcccgaaatgtcttctgcgttatgtctctcatggcatagggagcgcacagggggcggccagtcgccgccgccccctgtacccccgggctctggccgccaaaatcgccacttcgtggttccttcgacttatccctacaggcttcgggtcgggccgaggcagcgtccgtgcaaaacacggccctcagcccgcatccatgcgggctgccccggcctgccgggaacgtctcagcgattttgaggccaccaacaccggcagtttcagtagccatggatacaagggtagagctctgcagcgtgcaatggcacgaactgtaggtcgggtaaggcgtagccgccacccgacaaaaaaacggcgctgcgggtcgcccggataaggcgcattgcgcctctatccgggaaacctcacctgctgagaccgaatcttcaccgaattgtaatctgaacgacatctgcgccttctactgtctgggcaggacagaggaggagtcactatgtttagtctcgacaacgttctcgatgacctgtggcctcaggcgaggcccgccccctggcagaaaaaggtgttgaaaaagcttctgcatgaagaagagtttcagcaatttgccgctcgccaccgccacctgaaaggacttgatacggtcgaacaggtcctcgaacatctcaacatccgttgcgctatcccggcgcatgaccttgaacaaatccccgaacatggcccgctggtgattatcgccaaccacccgaccgggacgctcgatggactcgctctgctctacgcggtctcccgcgtgcggcgcgatgtcaaagtcgtcactaaccgcatgctgacccatcttgaaccgctgagctcgctgtttattccggtggataatatcaacggccgtaccgccaaaacggcgctgcagcagatggaccaacagcttcaacagggcggcgtgctgatcttcttcccggcggggaagtctcgcgcctgacccgccgcggcatccgtgataaaaaatggcatcacggcttcatcaagctggcggcgaaataccgcgcgccgctgctgccggcgtggatccgcgcccacaacagtccgctgttctacgccagcgccctgatctcagagaatctgccgctgctgctgttaatgcagcagatgtttcgccgccgcgatagcagcttgccgttacgcattggtcagcaaatcgcgtggtcatcgtggcatcagccgcagctttccgcccgcgaactggcggaccgctgctaccgccacgtcgagcgcctcggtaaaggacaccccggcctgtttaaaagcgaaagcgcgatcgcccgcccggaagaccgcgcgctgctcaaacgcgagctggcaaaaaccgaatgtctgggcaaaaccgcggacggtaagctgatttatctgtggcagcgcaacggccaggaagaggcgccgctgctgcgcgaactgggccgtctgcgggaaatagccttccgggcggtcggcgaaggcagcggcaaacgccgcgatattgatagctacgatgatgactacctgcacctgattttatgggatgaagaggatctggagatcgtcggcgcctatcgttttatgcctaccgccatgcaactggagaaacggggactggaaggcatctacagctacagcctgttccactacgacgcacggatggacgatattctgcagcacgggattgaactggggcgcagcttcattcagccgcgctactgggggcgccgcgggctggattatctctggtcaggcatcggcgcctggctggcgcgtaatccgcactatcgctatctttttggaccggtctcgatttccggcggcttgccgcccgatgcccgcgatttgctggtcgccttctaccgcttatggtttccggcgacgcatccgctggccaaatcccgccgcccctacccagcttcgctacccgacgtgctggcgcagtttggcggcgaggattacaccgaagacctgacgcggctgaagtcgctgcttggcaacctcggctgcggcatcccgccgctgtataaacagtactcggaagtgtgcgagccgggcggcgtgcagtttatcgatttcggcagcgacccggactttaataactgcgtcgatgggctggtactggtggatttaacctacctgaaagccaaccgctaccagcgctacatcggcgcgcatctctagccgtttatcccgcccggtagaacggcttatcgccaagaattgtcgcgcggtgcataatgcgccgctgcggcagatagtcggcgttagcgtaatgctgcgtcacccggttatcccaaatcgccacgtcgttcggctgccagcgccagcgcacctggaattccggtttagtgacgtgagcaaacaggaaattcagcagcgcctcgctctctttctcgctgacatccacaatgcgggtggtaaacccttcattgacaaacagcgcctgcttaccggttaccggatgggtacgtaccaccgggtgcaacagcggcgggttcttcgccaccgcctcgcgccagcgctgatgctccgcttccgtcttgttgtacttgtactcctggaacgatttgcggaaatcgtgctccgcgcgtaacccgctcaacagttgacgaaacggttcggagagcgcttcccacgcggcaataccgctggtccacagggtatcgccgccggtagaaggtaactccttcgccgccagaatcgcccccgccggcggtgtgtcgataaaggtcacgtcggtatgccagttatcgttgtccggcggattatcgttatgggtatccagcacgataatttcatccacgcccggcgcatgcggatagaccggatggatatgcaaatcgccaaaacgtaacgccagatcgcgctgctgttgcggcgtgatattttgttcgcgcaggaataccacctgatggcgcagcaccgcgtggtatagctgctcaaactgattgtcgcttaacggacgggtcaaatcggctccggccacctgcgcgccaatatacggccccaacggggtaatgctcagacgttcactcattgtacttctccatgccagggcgtcaggcggcgctgcaacgcgcgcagtcccagttccagaacaaatgcgattatcgcaatcaccgcgatcccggctaacaccacatcggtcgccaggaattcaccggcggattgcaccataaaacctaagccgcgagtggcggcaatcaactctgccgccaccagcgtcgaccaaccgacgccaagaccaatgcgcaggccggtaagaatttccggcagcgcgcccggcaggatcaccagccacagcacctgcgcacgactggcccctaaagactgcgcggcgcggatgcggacctgctgcgcgctttttacccccgccagcgtcgacatcactaccggggcaaaaatcgccagataaatcagtaatattttcggcgtttcgccaatgccgaaccagatgatcaccagcggcagccacgccagcggcggtaccggacgatacagttcgatcagcgggtcgaggatcccgcgtaccgttgggctcaatcccatggcgatccccaccggtacgccgacgatcgccgccagtatcagcgcgatggcaatacgcgtcaggctcgccgccagatgctgccacagcgtcgcgtccataaagccttgcggcccggcaatggtcagtagcttctgcaatacctgccacggcgagggtaaaaacaacgggctaatcagctgcaacgcggtcaccgcccaccagatagccagcaatactgccagcgtcgctacgctaagggtcagctgtcgtgagagcggccagcgccatttcagcgcgcgctggcgcggtttatcattaaggaccacgctcatgagaaagcctcccgttgttcgaacacccggctaagcacatattcgcgctgggcgataaattgcggatccgatttaatgctgcggcaggattcaccggcgacaaaacggcggccaaactccagcggcaggcgttcctgcacccgccccggccccggcgacagcagcaccagctcgctggccataaataccgcttcttcgatatcgtgggtaatcaacagcacctgcttgccggtttcatgccacaggcgcagcagcagggtttgcatttgctcgcgagtaaaggcatccagcgcgccgaagggctcatccagcagcagaagctgcggatccgccgccagcgcgcgcgcaataccgacacgctggcgctggccgccggaaagctgccagataaagcgcttttccgccccctgcaggccgacttttttcaacatttgcgcggcgatttcccggcgtcgggtcttttcaactcccgccagctgtaatcccagcgcgacgttatccagcacgttgcgccacggcagcagaccttcattttgaaacaccacgccgcgatcggcgcccggcccgtcgatgcgacggccttcgagagtgatgctgccgtgctggtaaggcacgaatccggcaatcaggttcagcagtgtggttttgccgcagccggaagggcccagcaccaccagcagttcgccgctgtccaacgtcaggttgatatccgccagcgctggtttaccgccataatcagcggaaagatgcgagatttgcagcatcagagcctccttttatttcacaaaacggtcggtaacgaactggctatagtcggttcctgcggccggcactttgccctgctctttgaggaatttcgcggtatcgataatcgcctggttcaccgggccattaagctcctgagcctgctgggcggcggtaagataggtattgcctttgactaacaccggtacatccgcctccggcacgccgctcagtcgcgacagcttgctgagattttccggctgcttcagccacgcctccgggttggcgatatagggctgctgcgcgtcgatggcgcttttagcgaaagctttcacgacttccggatgctgctcggcaaagtctttacgtacgacccagacatccagcgtcggcgcgccccattgccccacctgctcggagtcggtcagcaccttgccctctttttccagttcgttaacggctggcgcccacatgtaagcgccatcgatatcgccgcgctgccaggcggcaataatcgccggcggctgcaggttgataatctgtacctggcccggtttgattccccaatgtttcagcgcggaaagcaggctgtagtgggtggtcgaaataaacggtaccgcaatgcgcttgccaatcagatcttccggcttagtgatatctttcttcactaccagcgcttcggaattaccaagctttgaggccagcaggaacacttcaatcggtacctgctgagtggcggccaccgccagcgggctggagccgaggttgccgatttgcacatcgcctgaggccagcgcgcgtacgatgctggagccgctgtcgaatttacgccagtcaacggtggcgccgctggctttggcgaaggtgttatccgcctgggcgactttcgccggttcagcggaggtttgataggcgacggtgacgttaaccgcctgcgcctggaaggcagcgaaagccagcgccgccagaagagtaattcgcgatgtgaatgccatagtgtctgcttccccttagttgttatgggtgcagtatttccggcatcagcgtggagatgaagtaattaaaaattctgcctaatagcgaatcgtttttagaagaaaagcgggattagatagttaaaaacagggattagaaaaaagcatcccctcttccccggctacggcgcgttgcgccgtagccggggatacaaaacaacgattagcggcccgccgccagcgcggcaatatcctgcggcgtggtacgacagcagccgccaatcagcctggcgccagccgccagccactgcggcaaataggccgcaagcgtcgcgcaggcttcaccgtgatgatgccaggtcttggtcagcgcatcatagtgctcgccggagttaggatagaccaccagcggcagcgacgtcaggctgtgcagatgctgcagcgcggcggtggtattttccagcgcgatacagttaatccccagcgccagcacctggggattatcggccaataccgcaacaacctcgcgcagcggcgtgccgtcactgagatgttcagcgtcgcgcagggtcaacgagaaccaggcgcgggcgcgcgggtagtcacgcagcagcgccaccagggccgtgatttcggcaaacgacggtagcgtttcacaggccagcagatccgccccggcatccagcagcgcttcgacgcgcgggcggtggaacgcctgaaacgcctccgcgctgcgctgataatcgccgcgatactcagagccatccgccagatacgcgccatacggcccgaccgacccggccaccagcaacgttcccgcctgcgggttttccgccagatacgcctcgcgggctttacgcgccagctcgacgcttttacctatcagcgccttcgactgcgcctcatccagcccgcgggcggcaaagcctgccggcgttgcctgatagctggcggtgatcgccacctgtgccccggcgcggaaatagtcgagatgcacatcgcggatcagctgcggattctccagcagtaccttcgccgaccataaactatcggccagattgcagccgcgcgcttccagctccgtcgccatcgcgccatccagcagcacgaacggttgcgtttcaaggatagcggttagcggattattctgcggcatgttgcggctcctgagttaatttccgtgtacgagtcagatagtaagcaccataacatagcgcgacgaacgggatcccgcaccacagggcaatactctggcttgggtcaaaggccagccccacgcaggccaccaggcagaggacaaaccccagcaccggcaccagcggataccacggcgcgcgatagtgcagctcgcttaaggctttgccctgttgcagatggcgacggcggaagacaaaatgcgacgcgcagatgctcagccataccgcgaccaccgcaaaaccggaaatcgccgacagcgcaacaaacaccgtatccggcgcgactacgctggaaaacagcgccagcacgccgcccagcatgctcaccgacagcgcggttagcggcacgccgcgtttattcactttggcaaagcaggctggcaacgtcttctcatttgatagcgaccacagcatccgtccggaggcatacaggccggagttggccgccgacaaaatcgcggtcaggatcacgaagttaaaaatatccgccgcataaggaataccgaccttttcaaacaccagtacgaacgggcttttttccacccccgcctgctgcatcgggatcagcgcggcgagcacgaaaacggtgccgataaagaaaataatcagccgggcaatagtggtgcggatcgcgaccggtatcacctgatgcggattttgcgtctcgccggcggcgatgccgataagttcggtgcccgagaaagcgaagttcaccgccaccatggtcatcaggatcggcaggccgccatgagggaaccagccttcggcggtgatgttatgcagccccggagccggtgaaccgtcggtcagcggaataaagccgaagatggccgcgccgccgagaataataaaagcaatgatggtgatcactttgaccagcgagaaccagaattcgccttcggcaaagaagcgggtagagataacattcagggcgaaaatcaccgcgcagaaaatcacgcaccagacccacaccggcacctgcgggaaccagtactgcatacagaatccggcggcggtaaagctcgagccgagcgccacggtccaggtcagccagtagagccacgccacggtatagccggtcgccgggccgagataacgcgcggcatacacgtgaaaagcgccggtttccggcatcgccaccgacagttcgccaagacactgcatcaccagccagaccaccagcgcgccgatcagatacgccagtagcgtgcccgccgcgccggtggtcgagataatatagccggtattgaagaataaccctgtgccaatgacgccgcccagcgagagcataatcaggtggcgcgttttcatggtgcgcttaagttgcccaccttgttgttgtgatgttgtttgcatattgccttctttatgtatggacgtctaaacatccaaatgaaggtcatttataccgtgacggcggggaaattgcaaaacggggatggaaaaaacatgatgaacaggcgttggggccttgggtttaaagctgcttgggctgcggagcctctcctttttaccgcaaccgcaagcagccttcggctacacagagcacacctcgttccagtaggcttcgcgcgtccagcgccgctcagtatgttttgtcatggcgaaaccaccgggtttccacgttgccgagatccacgccatacaggctggcgaccggcaagatcgcctccatcatccgttgaccatcttgctgcccggcttctccgttagataaaaaagccagccagccggtaatccgttgccacagcgctactttcatttctcctccatcggtcgggtttgcgttgttgttatttcaaccacaatcgccgacgggcgggaaatatcaattccgaatttgtaatcctggaagacgcatattagccgctgcgcttcggtggctaaccccttcctgtaaaagcgatttgattaacagcaatatccccatttttattaagagattttggttatagataagaattttttcttctttgccggacgaggcgcttttgtgggagcgtgataaacacaaaacaaaacagggattcaggggaatgatgatgcataaaacttatactaaaatcgcttttgcgctgggcgcgctgctgctggccgcccaggcgcaggccgaccagttagccgatatcaaagccgccggggtggtgaaggtcgccaccttcgacgccaacccgccatttggttccgtggatgctaaaacccatcagctggtgggttacgacgtcgatttcgcgcaggcgctggcgaaatctcttggcgtcaagcttgaactggtggccactaacccggctaaccgtattcctttgctgcagtccggtaaggccgacctgatcgtcgccgatatcaccattaccccggagcgcgcgcaggtaattgatttctcaacaccctactttgtaaccggccagcagttcctggttccggctaagtcgccggataaactggatgactacagcaaagcgcgcatcggcgcggtaaaaggcaccaccggcgaacaggcgttgcaccagcgcttcccgcagtcgcgggtgctctcctatgacgatattccattggcgctgaccgccctgcgaaacggtaacgtgcaggcaattacccaggacagcaccattctcgccgggctgctggcgggcgcgccggataaagccaactttaaaattctgccagatttgctgagcaaagaagagattggcgtcggcgtaaaaaaaggcgagccggcgctgctgaaagcggtgaacgacgagctggttaagctggaaaaatccggccaggcggcgaaaatctacgacacctggtttggccctggcaccgcctctccgcagccgcgcgcctttaccatagaagcgaaataaccctgatgttttccgccttattttcacgctccgcggcttcggccgcggatttctcgcatctgcagcaggccagtattacctttcgcgacgtggttaaacgctacggcgatcatcaggtactaaacggcgttaatttaacggtcaaccccggcgaagtggtggcgatcctcgggccatcaggatcgggcaaatcaacgctgatccgcctgatcaaccagcttgaatccttaagcggcggcgagatcctcatcgatggcaaaccgacccgccgcctgaccggcagcgcgctgcgccaattgcgcagccgggtcggcttcgtttttcagcagttcaatctctacgctcacctgacggcgcaggagaatattaccctcgcactggagcgcgtgcacggctggcaacatgatgccgcccaaaagcgagcgctggaattactcacccaggtcggcctcacagcgaaagcgcgacagatgccggctcagctttccggcggccagcagcagcgcgtcgccatcgcccgcgctcttgcctcctcgccgcaaatcatcctgtttgatgaaccaacctcggcgctggatccggagatgatcggcgaagtgctgcaggtgatgaaagccctggcccacagcggtatcaccatggtggtggtcactcacgagatgcagtttgcccgcgaaatcgccgatcgggtggtgtttatcgacggtggcgaaatcctcgaaaccgcgccgccggcggaatttttcgcccgcccgcagcatgcgcgtacccgccgttttctgcagaaggtgctcgacccgctacatcaggagagcgttgagtgatggcgattctcgactggcatggcgtgctcagcgggcagccgctgcagtggattatctccggttttctcactaccgtctgggtcagcgtggccgggatactgctggccaccgcgctggcggtgctactgctggccctgcgtctcggcggcggacgccccggccgctggctggtggcggcgtgggtatcgctgtttcgcaatacgccgctattggttcaactgctgttctggtacttcgctgcctggaacctgctgccgctggcagcgcgcgattttatcaacgactcccatagctggtcgattctaccgggcgacgtctggtggctgacgccggaatttctctgctcaatgtgggggctcggcgtatttacctcggcatttctggtggaagagattgcctccgggttgcgcgccgtcagccacggccagcgcgaagcggcgctgtcgcagggatttagcccgtggggtgaattacgttttattctgctgccgcaggggctggccaacgcctggcagccgattgtcggccagtacctgaacctgatgaaactctcttcgctggccagcggtattggcttcgccgagctcacctaccaggtacggcaaatcgagagctataacgcccatgcgctggaggcctttgctgtcggcaccgcgctgtatctggcgctgggtatcgttatgggactggcgctaacgcgcttcggtccaggatatcgtcagccacggagcgcacaacatgaacgctaacctcgcggtgatcgccgacaaccttgattatctgctgtggggacggctggcggaaggccaacccggcggcgtggcgctcactttactgatggccatcggcgcgaccgcgctggcgctaccgggcggtattctgctggcctgcgccgcctggcgctacggcggagcggtccgtcgtctgctgttcctgtgggcggaaatcattcgcggtatcccgctgatcttcgttattttctggctgtggtatctgctgccgatgctgaccggcggcgatctgccgggcgcggtaacggtcaccctggcgctggcgtggttcaccgcagcttcggtgatgcactcggtgctggcggggctgcgcgccctgccgcgcggccagcatgaagcggcgctgacgcagggcttcactccaggccagacgctacgcttaatcctgctgccgcaggcgctgcgcaacgtccagccgtcgctggtcggcatttttatcggcctgctgaaggacacctcgctggcgtttatcgtcaacgtgcctgaactcactaccgtcgccgggcaggtcaataaccgggtgcaaatctacccgctggcgatattcgtctttaccggcgcggtttactatttactgtgctgcgccctcagccagctggcgagccggcgttttaccaggcgtagcgctgacaggcgcttcgcagccgattgagaaacagccgggcattggcggtgagcgccgatttttgcgaccacaccgcgcaatactgcgccgcagggagcgtggataccggcagcgtgaccagcttctcgccaagctgcaacggctggttcatggcccgcgcgacgatggtcaaataatcggattccagtaccatctgcaaaccgacaatgaccgagtcggtgcgcagcggggtaatcgacacctggcgataaaagtgaatcagctcgttttgtaactgctggtagtagcccatcggcgactccggcagcagccagcgggctttacgcagcgccagcagatcgctctcgtgagccagcggatgccccttgcgcgccaccacgcagaatggcgcggtaaacagcggttccagcatcaccccttccggcggatgcatcgggtcgaccgaaccgatcgccaggtctatctctccgctgcggacgcccggcagcagcgacgaaagctgccctctttcaccgtcatctgcacctgcggcagcgcctgcttaaacccttcggccacctgcggaaacaccgtcagggcaatcagcgatgaaaagccaaccgtcagccgaccgtgggtgacatggttaatctgttccacctcatccgccgcgcgccgcagctcttccagcacccactccgcgcgctgtaagaaagcgattcccgcttcggtcagggcgaccccttctttgctgcgcagaaaaagttgcgtgccgaggatttgctccagctcacgtaatgtccggctcaacgccggctgcgattgccccagttcacgcgccgccgagcggatgctgccgctacgcgccacctgccgtagcgcctgcagctggttcaatttgggaagatatttcaccgcttacccctatcagaaaaaagcatcacctatagaaaattatatcttcccgccgcgcgggtaaagcctgaggatgcggtgggggattccccacgacaacacatgcaaccatgagacaccgggcggaaaaaaatgaaaagtcagtctcagatgatcttcttactgtttatcggctacgtggtcgtttacatcgacaaaaccgtcaccggcttcgcgctgctgcctatcgaaaaggagttcgggctcaatgccgagcagttgggctatattaccggcatcttttttctcgcctattcgctgtttcaggtaccggcgggctggcttaacgatcgcattggctacaaaacgatgctggtgctgtcgctggcggcactggggatattcgcgctgtgctttggcctgctgggagcgagcttcggcctgctgctgctgttccgctttctgtcaggcgtcggccactccggctatccctgctcctgcgccaaggcggtggtaagcaacttcactctagaacaacgtaccttcgcccaatcgatattgctgtcgtcagcgggactggcgatgaccattgggccgataattgccgttaacgcgctggcgctgctcggctggcatctgtcgttcaccgtactggggatcgtggcctgtgccatcgccctgctgatcgccctgcgcgtgccgcgccggcaaccgacggcggtggtcgcgaaacagagcgccgccggcgccgccctgtggcgtaaccccacggtaatcctgctctttctggctatcttttgcgtcaatattcccagctatggcctgatggcctggctgccgaagttttttgttcagagtatggggatgtcgctgtctgcatccggctacgtggtggccgcgggcggtctggggatctggatctcatcgctcggtaccggttggctggtgggtaaatattttctcaatcgcgaaccgctggtcatcgcgattagcgcgctaatcagcgccgtggcgatcttcgccatcttccatgcccaaacgccgcttatcgccagcctgctgctgtttatcggcgaaattttcctgatgtcgaccttcgtcaccgcctttaccctgccgatgaagcgcctgccggaaaatatgatgggctctgccatcggtctgattaataccggcggtaccctcggcggctttgtctcgccgatcgtcattggctatctggtggagaaaacccacggttacgccagcgctttcctgtttctttcactggcgatggtttgctccgcgctggcggtgctgccgctcatgaaacgtaaaaccgtcgtcagtcagcccgttattgattgaaggagtccctgatgcaccacgccactgaacaattcatttccgccgcggccgaggaagcgctgcgctggcgtcgccatatccacgcccacccggatctgtcgtttaacgagaagccgaccgccgattacatcgcccgcgagctggcgctattttccggcctcgagataagccgcccactggaaaatagcgtgattgccgtgctacgcggcgcgcatcctgggccaatgtgggcgctgcgggccgatatcgatgccctgccgctacaggaagagagcggtgaagcattctgctcaacgaagcccggcgtaatgcacgcctgcggtcacgacgcgcataccgcgatgctgatgggggcggcgaaagtcttgtgccagcttcgcgaacagctgcacggcagcattaaattcatcttccagcccgcggaagaggtgccgccgggcggcgcgcgtgagctggttgagcttggcgtggttgacgacgttgaacatattttcggcctgcatgttttccccaccagcccggttggcgtgataaccctgaaagagggagtgtacgtcgcttccagcgataactttgatatcaccattcgcggcaaaggcggccacggttcaatgccgcagcactgtatcgatccggtaaccatcggcgcggaagtggtcggcgcgctgcagcagatcgtcgcccgccatatcgatccgggcaacgcgccggtgctgacaatcgccacttttcaggccggcgatagctataacgtgatccccgacagcgcgcgcctggccggaacgctgcgtacccatagtcagcaggtgcgcgaggcggtaccgccgctgatggcgcggattatcgacggcatcaccgccgcccacggcgccagctacgagattaaatggcagcagggctatgcggtgggaaacaaccacgacgccaccaatcatatcgcccgcgaagccatagcccgccatttcccggcaggcacgctacagctgcaggataaggcgctgttcggcagcgaggatttctcttcctatcaggagaaaatccccggaaccttcctgtttatcggctgcggcaatgcgcaaaaaggggcgacgtggaacgtgcacaatccgcattttcgcatcgacgaagatgcgctggcggtcggcattaagacccatatcgcgctggtgagtgagttgctgaacgaggaataattcaggcgattgcccggctatttcaccgggcaatcattgctaattttaataaatttctcgttatagataatgtagtggttgccgggcttacgcagcgacggctggcgcacgacatcgccggggcgcagataccaggcgtcaccttcctcttccgtggtgtcgcatcccggtttgatcaacaacttaaaccaggtattgccggtattactgacgcttcccgccgctttatcgaacgcccatttaaactgaacctgccgcgggcgcaccaccagaatggtatccatcaccaccaccggctccatgctgatctgcccgcccgccggggcgcgcatcaccaggttgcgggtgggaatttcacgaaacgagacccgatagtagcgttcgcggttatccttcggcccgtgataatagaacttaaaatattcgctttcgcccgcctgcagcgtcagctggcgcggggcgaacagcagttctccgtccgccgggcgggcacgaacctcatggccgccgggccggtcgatgccaacgatcgacacccgatatagccgcgcgcttttattgttgttgataacccttttcgccgcaaactcagcgtcagaggccagcgaaaaggtcagattaccgacggaaatcgcctgcgccagcggcgcggccagcagccacaggctcgccagcgccagcttaattaatgttacgccacgtcgcctggacatgaatctctcctgaagcgctgacctcgccaaaccagccgttgtcggtgatagtgcgcagcgagataggatcgtccatggcaatcgagaagcgcaccgttgttttatccatctgccccacatcgccggaaatatcagtccacggcgtggtcagccatagcgcatcggtcatgtcgtgccagctatcgtcgcagccggcgtcgtaacttttcgtcgccccgctttgggtaatgaaagagagcgtcgccgggaaaggcacctgcgcggtgccgtccggcgagctgaacaggcaatacgagcgcccgccaatcgcctgcgccgggccggtcactttaatcaacacctcatcggcggcggttttgccgctggtggtgacgatgtagccgaaatccagcgccggttcaccgctgccgacgtagccctcgcgtgacggcgccgaagtgtactcatcggagataatgctgatgctgaaatcacgcggtttgataattaacgtattcgaagtagaaaactcataccaacctgactctggtgaagtcgtattctgaaaacggaagttaaacaaatctttagtgttaatgtcgcttatacccaacgccaccatctgcttaaagaagttgctcgagaaaaagacgtagatcgcctccgaactcttcatttcgttgaacgtgtagtaataagccgtattgctcaccggtttccacgagctgccgttgagactgaactgcatatcgtacgccccgacggccgacgccagcgatgagttagcgattgccgggaagatatgtatcgaggtattgctcaagccattggtttgcaaattatagttgaccattttgcagcttaaacccgcacggctaccaatagtctgcgtctggcaatcggcatttccttcgcccagcgtcggtacgccatcgctgttaataaatacttctgccagagagtgggtgttgatgagcctgagattcgccgctttggtgtgagtaacgttacggacgtaccagttacctgatgcctgatctttacagcgctggccgaggcttgcatcgtaagccacggatgtctgacaggcattaatggtcatcgtaaagctaccgccaaccggcatctgttgtagatactgatagaaagcatcagacatcatgccgtgcatccacttagcgccgccgctggttaccgtcgcgccataaaaaccgctagcgtcggtagtctgcggctgaatcaggctggtcgccatatcgcagccgccataccagttaatacagcgtagccccagcagcggatgggataccggggaattttccagccacatgtcgaacttccagtttgcattgagcccggtgttatagccgttatcgatataacccaggctctgctgataaatcgtgcctgatccgttgtattttaaacccgtccagcggtttgcaccggtcatacgcggatccaacgcgccgccaggggtgacgaagaagttatcatcagagttgttttcaacgaagacgaattcgcgcgctggcgcatcgctccaggtggttttcgagatcgcggcataagtttgcgatatcgacagttccgcgagcatcgctaccatcagagctagccacttagctttcattaccttctcctgtctgctgcaccgccgcccatgaagagagaccgctgcatactacgtcccctacccacaccgcgccgcgcgcctggctgagctccagcgccacttcacaggttttatttccgccgtagctaaaatcaatggtgggatattttttatcgacatccatgacaaattcaccgttttcatcggtgcgggtgcgcccgatatggttattaatgcgcgcgttcgccagcagcgtgccgtcttcggcgcggatgcgcccggagacggtgaccatttgcttcacttccggctcgatcaccgccacgttaccggataaagcgtcaggtgactcttacgaccgctgacaatgtcgtagctgtcgagcgagtttttactgttctgcagttcgacttcatagcggctgtacggcgacagcggcaggtagttgcgtttaccgctgagctgcacgatgcgcccgttaaccttagcgctgagcttgccgtcgtcttccagaccggtattgaagatcaccccggcattgccatcggttctcccgctggcggcgatatttttcccctgccagccgacgctgccgctggcggtcaggttggtattcacgtagccgtcggcgccgctgttgacgttcagcgtgccgttggtgtagcgcgtttcgaactgcgtataagcgccgccgcttaaggttttgtcgtcgccggtatcgccggaaatcgcccgcgaaatattggcgccgacggttcgaatcgccccttcatcaaactgcttacgcgccgagatgttggccatggtatagccgttctggtgggtcatcccggcgctgaaccagttgcccagcggcagtgataaatcgagggcgatatatttcccggtgttggcgttgctatcaccgttgttatagcgctgtaagcccgcgcgcaggcctagcgagccaaaagagccgctataaatcgtctggtaataatccgccgtgtagtaatggctattgtagcggcggtcatcgttatagctgatgctaaaagtacctagttttgaccacagggcgttaagattcagcgtaccgccaatcgcccggttgtcggcatcgctgcggcgcagcttatcgccaatgacggtcttctcctggttaatccacagtgaactaaagccgccgggtaaggtggcgctgatgctgccgatgctgctccaggaactgtcgctggccagcatgttttgcaggttgatattcaccgcctcggtcagcggcagcgtgatgcgcgtttcgccgacggcattgttatcgtagccgtagccagtggccgcccaactcagagtgctcagcgatccggaagccgacgccccgccagccagctctctttcgccggctgcgtctttttaccgctttccgaccagcggtccatgtggaaactgccgcccagatttgccaggccagcggcgcgcccgcgccgcgtccacggctgaacagtttgttgacgcgttgggtgcgtttgctgaccactcttccgttgacgataacttcgacgtcaacgtcgtaaattccgtacggtaggcctcgggtatcaacttcatgattccccatgacgaagttctgcacgcttaacaggcgcccgtcgcgcatcaggtggacctcgcctgctgccggtaagaatgccaccaccggcgtcgccgactggctgttatcaaataccgtagagctggcctggttgccccacgacgcgccgtagattttaccggcagaaatcgcggtcatcggcccagcgattgtaagttccaggtatccagcattccgccggcaaaacggtgcccggcgaagtcgcgctcgtacatcgctttatacagttcgttgtcctggtggctggtgccgatgccgtacagcgagccgtcgagcaccacgtgatgctcacgcagcgcgctaacgctattgagtgacagatagctggaggtattactgccgccgctacgcatctggttgttgtagacaccaaggttgtaggtgaggttattgctgaaagttttaacgctcgactggccaatatcctcgctgcgcgaccgcagcacggttcccagcgcctcacgtttcaccaccagttgcaacagcaactggcgcagactaaggtgtagctgcgcggcatcggttaaggggatcttcagcgcgtcgttgaaagcctcattggataaacgactgagctgttgacgtgtctcgtcgctgacgcgagcgttgtcatcgccctcttcgagggtgatttgccgaacccgcagcacgtcgccatcaagccagatatacgcggcgccgatacgctgatcgttctgattatcgcggctgccttcaagatgaataaacagaggaatgctcatgccgtcctgcaaagcctggctgaaagcctgcgggataatcacgccgccgatttgctgcacgcgctcggcggccatgctgtcgctataaggcgccagcaaaagaaccatgccggaggcaagcagcgcgttcagtccaggggtgatccgtcgtaaaggcatagtcttaatccatcagcacacatgtctatttcacgggaacaaactgctcgccctgccagagcgcgacccgtccttttttgtcagcaatattgacgcgcgtgaagcgacgcgatttccccggcatcaggtaataattttctttgcactctttgccatcggcgattttcagacacgggccgtaggcgatgatgcgcagggtggcgttaccggtattggtcagcgtgtcgctggcaaactgatagcgaaaattagcctgccgcggcgcgactaccagaatggtgccaatacgagcagaagcggtggccaccgcgctgcgctgggagccattgcgctgggcatcgcttaaagcctgatcgaaccagacaatacggtagtagcgctctttatcatccgcggggcctttgtagaaaaagcgcaccacttcactggcttttgcgggcaataacaagctggcggggtcagcaggacttcatcctgtttatccatcgggatcactttgccgccatccagcggtgaagagagacgttccagatgaatgttgattaagcggccgctgtcggtggtatttttaatctctttactcagcgtgctgctgccgctgttcataaaggaagagatatcgccgacatccagcgccagcgcgggattcgccaatcccagcagcaggccaatggccaggagatgttttttcataagcgttcagtccatgaagaggcaggggtattcccctgcccggtgctacgagaaaatcagctggtccaggttgcgtcgaactgcacgctcacgtcaccgctccagatcccttccggcagcgtgctgtaatcggttaccgcggtggtgccgtcggtggtaccgctgatgattgagaagttaaagccgtcctgcgcggtggtgcggcctgcggtgttgtagccgttagacagcgcgctgaggttgccgcccagtacgccgttagcggtgtcgatcatgatggtgtctgcggtcttctctaccgcggcgccgttataatccacgcccacactcagcgttgagccggaggtatccagctgagtcaaggtgttagtgataagacgtgaagtcagtttgaaggcagtcgccgtggtatcgccttcaaccgcaacatcaaacagacctttttgtgagttaaagcctttaatcccttcggcatactggaaagccaggctgccaagcggggtaacaaccagtttgctggaggtgtcttttttcgcggtcgcagaccaggtagcaacggcctgagcagtgacatcagcagcctgagcaacacccattccagcaaacgccgttaccagagcaatagcaataaccttttttttcatagctttttcatcctgagtttaattaaggacaagtcgtcccggtgtaccactaaataaacgttacataactaatttataaattttcgaatacagcttggcctcagcatttcgccgatgggtataaatagttttcacactgcaattttcaattctggcgatagatttcggatgcattccctgggccgtcattctaatcaccgtcatttcccggtcagtaattttttctttcttaatatctttacgcagaaaccgaccattaattacataggccagttcttttcttatatcgcgcgcgaggtcgacatacaccacgccgcgaatatcaccgttgtaataccaataattggctaatgcttctgactttctcgcggcaatcagaatgatttgtttgcccttggccttggctaaccagtcgttgtcatagcgaataaagtaatttaaggcattggtactcagattgataaacaaaaagtccttacatattttatccagtgacaaataaataagttcttcgatatctaaaatgagttccgacaagccttttaaaaaataagtatcatgtgctggccaaatacatttatcaagggagcattgatcgtccatatactgtctatcctcttcatcctggaattctacctttcaccccatcgccgatagccaggcctgcagagattaaacctgcaaattacccctgtttaagttggttataataaaacaccagcggcattatttaatcactaataatgtcgaaattaattatcgatttatatttcttgttggattcaaatttaggttttttctgattaagtgtcaataagcaggatgtgaagctaattctcatttatgtcaattttttgctttttggcgaaatcctattttttgctcaaaaacaaaaaacatttaatttcatgtggttattgaacaaaaattactacaatccgaatcgattattatatcatccaggatcataacccttattcattaggaatattcttaataagcaagacaaatgacgttgcgaaaaatctcaataacatataaaaataagaagataataccatgaaatcgctatttataagacgataaacccaaccataagctgcgtgaatggttttaagcaccgcacaaaatgcataaacataaacaaaaaaaccgctttcagaggactattaatccaatgaaagaatgatatctaagagaatgagattagttctcatatttctttcttatttgctctcattttcattagtgtagaccatcacgctatgattgccgctgacatgtttcttttaccttgcagataagcgtttcatcacgctttcattattttttcgccttaccgtcatcgaaagttcacacaaaacgcgattaatagtgaccagtttatgacgaaccaggacactcttatgaacagctctcttgccgcggtggcggaaaccgaattttcgctaactacgcccatcgccccaacacggcagcggaaagtcttaagcgtgcgcaacctgagtaaatcttacaatgctcagcaaaccgtcctcgataacatcagctttgacctccatgccggcgaactcgtgggcgtgattggccgctcgggagccgggaaatccacgctgctgcatgtcctgaacggcactcacagcgccaccggcggtgaaatactcagctttccggaagtcggtatgccccatgatgtttcacgcctgaaaggacgcgcgctcaatgcctggcgcagcgaatgcggcatgattttccaggacttctgccttgtgccgcgccttgatgtgctgactaacgtactgctcggccgcctgagtcaaacctcaaccctgaagtcgctgtttaaggttttccctgacgccgaccgggcgcgcgcgatttcccttctcgaatggatgaatatgttgccgcacgccctacagagggcggaaaacctctccggcggccagatgcagcgcgtagcgatttgccgcgctctgatgcaaaaccccgggatcctgctggctgatgaacccgtcgcctcgctcgatcccaaaaacacccagcgcattatgaatgtactgcgggaaatcagcggccaggggattagcgtgatggtcaacctgcattcggtcgaactggtcaaagaatactgcacccgggtcattggcgtcgccaaaggccgcatcattttcgacgatcatccggtacagctgactcaggatgtcctgcatcggttgtacggcgatgaaattagccaattgcattaatttcctttagttaaaaacacacgggcaaaataatgaacaaacatattaatggcgcagttcgtttatccgcagcaatcgcaacgcttttcctggcgtggcaagcgagcgccgctgaacagccgaaggaattaaatctggggatcctcggcggtcaaaacgccacgcagcaaattggcgataaccagtgcgttaaacagtttcttgataaagagctgaaggtcgatactaaattacgtaactcatccgattattctggcgtcattcagggactgctgggcggtaaagtcgatgtcgtattaagtatgtcgccttcttcttatgcctcggtctatatcaataacccgaaagccgtcgatattgtcggtatcgccgttgacgataaagatcagtcccgcggctaccactcggtggtcatcgtcaaagctgacagcccatataaaacgctggacgatttaaaaggcaaagcttttggcttcgccgacccggattccacttccggttatttaattccaaaccacgcctttaaacagaaattcggcggcgacgcggataacaaatacaataatttcttctccagcgtgaccttctccggcggccacgaacaggacattctcggcgtgctgaacggccagtttgccggcgcggtcacctggacctcgatggtcggcgactacaacagcggctacagcgtgggcgctttcaatcgcctgattcgcatggatcatccggatctgatgaagcaaatccgtattatctggcaatcgccgctgatcccgaacggcccgatcctcgttagcaatgcgctgccggcggacttcaaagccaaagtcgtcaccgcgcttaaaaaactggataccgacgatcacgcctgtttcgtgaaagcgatgggcggtactcagcacatcggcccgggcagcgtggccgatttccagcagatcatcgatatgaaacgcgaactggttagcgcgcgttaatcccgtactgatgccgccgtccgcggatcaatgcggacggcggcgctacgttaaagaccttttcgccgcatgaataatacccataccgaatttgaacgttattaccagcaggtcaggacgcggcaaaagcgcgataccttcggctggtcgttggtgctgctggcgctctactttgcagccggcacgccgccgagtttaatctgcccactatctggcgctcgttgccaaactttctcgactatatgttcgagacgctgccgacgctgcatccgggcgttctgttagccgattcacataccaaaggctcgctggcgtactggggctatcgcctgccgattcagctaccgctgatttgggagacgctgcagctggcgctggcctccacgctggtggcggtcgcggtagcgacaatactggctttcctcgccgccaataatgcctggtcacccgcgccgctacgcttcgccgttcgcgtgctggtggcctttttacgcaccatgcctgagctggcctgggcggtcattttcgtcatggcgttcggtatcggcgcgatccccggttttctggcgctgatgctgcatacggtcggcagcctgaccaaactgttctacgaagcagtggaaagcgcgcaggataaaccggtgcgcgggctggcggcctgcggggcatcggccctgcagaaggtgcgctttgccctgtggccgcaggtgaaaccgatttttctctcctacggttttatgcgccttgagatcaacttccgctcatccaccattcttggcctggtagggccggcgggatcggccaggagctgatgaccaacattaagctcgatcgttacgatcaggtcagcatgacgctgctgctgatcattattgtggtttcgctgctggatatgctttccggccgcctgcgccagtgggttgtggaggggaaaaaatgagccaatggcaacatcaacctgatatcgccgccagccgcagccagcatcaggcgctgtataagacccaggggcgatacctacgctacgtcggcctgctggcgctggcgagcgtactttattacgtctggttctttatgcagttcggtatcagcagcgaacaactggcgaccggtctacagcagatggggcgctatctgctgcggatgtttgtctggcacgacttctggaactggccgtttgcctattacttcacgcaaatcgccattacgcttgccatcgtcttcgccgggacgattaccgcgacggtcatcgcgctgttgctgtcattcctggcggcgcgcaatattatgcgcggcgtgattcccggcattatcgccgtgttgatgcgccgcttgtttgacatgctgcgcggtatcgatatggctatctggggtctgattttcgtgcgcgccgtagggctcgggccactggcgggggtactggcgattattatgcaggataccggcctgctgggccgcctgtatgcggaaggccacgaggcggtagaccgttcgccgggccgcggcctcaccgccgtcggcgctaatggtctgcagaaacaccgcttcggcattttcacccagtcgttcccgactttcctggcgctgagtttatatcagattgaatccaacacccgttccgccgcggtgttaggttttgtcggcgcgggcgggattggcctcatctacgcggaaaatatgcgtttgtggaactgggatgtggtgatgtttattaccctgttgctggtcgcggtggtcatggtcatggacaccctctccgcctggctgcgccgccgttatatcggcggcagcgtagtgccgttgtatcaaagccagcaataacccctctccccggtggcgctacgcttaccggggctacaaaccagggaaaacgtctcgttattcaatccgccacgccagcaccggccagccgtgctggacgttggctgccagcagctgcggacacgggttgaccaaccgcacgcgatccgcatgcagacacagggacaggtcgtttatcgaatcggtataaaaagtgacttcgccagtatagtcaggatgcgcctcgcgccactgcgccaggcgcgtcactttaccctgctgatagctcggggtaccggcaatcacaccgctgtagccgccatccgccatttcaacatcaatacccaacgcctgttcaattcccagctcggcggctatcgcctgcaccagcagcgttaccgaggcggagatcaccaacattttttcccctcgcgcctgtagggtacggataacgtcccatgcctgcgggtagacccgcggcaacaccttttcgcgcacgaatcgcgccaccagcgtatccacctgcgcctgcgggatgccaatcagcggcgcctgaatcagggaaacataatcgccgatattcatttccccgcggtcgtaatccgccatcagcagcgcttcgcgcgccagatattccggatcgctcacccagccttcgcgcaccataaactggctccacagcgtactactgtccctttaatcagggtattatccagatcgaaaatcgtcacagcattagacatcggtcattttccataatcagcaatataagcctgtgagagcatgtataaataacatgacaggagcatgatccggctgcgtttcagcccaccccgccaaagcccatcgccagcagcaccagtagcaatagtagcgggtagatccgcacgtgccagcgatcggggagtttagccaacccgcgcgatgcgccccgcaatcccaaccagctcccggccaccagcagcccggccgccagccaccagatattaccgatgaaaccagagggcagcgtcgccttcggcgccatcagcatccacgtcaggctggcagtcgccgccagcggcagcgtcaacagattggccatcgccgcggcctgcgccatcgtcgcgccacgccggcgcatcagcggtacggtcatcacgctgccgccaacgccaaggaaggcggcaatcaggccaatcccgcagccaagaatagtctcgcgccctgtacccgacggtgcgcaagccgtcgacggcgccacaaagccggggcgaacgtagcaatccacgatggtcaccgccaggtacaaaataaacagccagcggatccactcgccgttgactctcagcgccagcgccgcgccggcaataccgccgatggcgatgccgccaagtatcggcagcagggagcgccagtgaaccgttccggcgcgcaggtggcggccgcttgccaacagcgacgtgcacagcatcaccagcgccgacgtcgctaccgctatttgcatcgcctgagcgcctactgcgccctgatggctcagcaacaggtaaagcagcggcacggtaacaaagccgccgccgaagccaaacagccaggtagttaccccggacaacagtccgcaaacaaaaagcccaaatatcatctaccgttcctccattcagggaggtaacgatatagaatagcgaaatggctgacttacgattaaaggccaatatattacgattttcagccaggagagtacgcatgcgcaatatcgcgattaatgatgtcgatcatctgccgcgccgggtattgggtctggggagcgattatccgcctgatacccttttaccgcgccatcatcatcgacgagcgcagtttctctatgccgtgaatggcttgatgaaagtcgaaaccgatgacggccagtggctggtgccgccgttcagcggcgtatggatacccgctaataaaccgcatcgcgtctggatgccgggcgtgagcacacatagcctgtatatcgaaccgcaggactcgccgcgcgccggggtacgctgcgaagtattgcaggtttcgccgctgctacatcaactgctattggccgcctgccagttaccgctgttgtatgaagagagcgggcatgatgcggcgcttatcaccctattactgtttgaactgcaggccgccccgccgctgccgatgtttacgccgctaccgcaacatccgcggctggctgaactatgcagcgcgtttctccgccagccggagattcacagtacgccggagctgtgggcccaaaagatgaataaaagcctgcgtaccttcaaccgccgctttttgcaggagaccgggatggcgtttcgcgactggcgtcataaagcctgcctgatgtacgctctcaccgccctgcgagaaggacgaagcattaccgacgtggcattaagccttggctatgagcatccggcggcgtttaccgccatgttccgtaaagcgatgggctatgcgccagcctcttttatccgccatcttaaaggaggaacaccggtctctcgcgacagttaaataagaacatcctgattctgctttgttatattttgatttagatagcaaacatttattaataaataaaatcaccgcgttcactatctgggaaaattgctaattacggcactggtgaatttatgcctgcggtacgtaagttttcgtaaattttgcgtttcatcattctgacgtttccgtgaatacgttataaatggcgacggtcgctccctaacatgaaaataacgacatgaagcccaaactcacccacgctttattacttgttcctttattgattttggcaggatgttcatcttcgccgaaaaagccgcccaaggcggtggcccaacatcattacgagccaatcgacagcggctccgacgatctgataccagtactggcagccctgcacgatcagatgcacacctgggacggcaccccttatgaatggggcggcaccgaccagagcggcgtcgactgttccggctttgtctggcgtactctgaaggaccgcttcaatctgccaatggaccgcgtgaccaccggcgatcttctgcatatgggcgtgcgggttagcaagcagcagctgcgacctggcgatttagtcttcttccgtattcacggcggcatgcacgtcggtttctacgataccgaccataacttcctgcacgcctccgccagccagggcgtcatgcgttcgtcgctggataatccgtactggaaccgcgtattttatcaggcgcggcgcttgccgaaggaatataacgcgcagatcaccatgaataacgacgatctgcatctggcgaaaaaccgctaatcctgacaaatgcaaaccgcggcgctcaaggccgcggttttatttttattacgctcagctttatcagaactgataggtcatccccagcgcgacgatgtcgtcatcgttaataccgagcttattatcgctcttcagctggttaattttgtaatctacaaaggcgttcatgtttttgttgaagtagtaggtcaggccgacgtcaatataattgaccagatcttcgctgccgacaccttcaatatctttgcctttcgacagtacatagcccagagacggacgcaggccgaaatcaaactgatactgggcgaccgcttcaaagttctgcgttttattagcaaaaccaccgctgatcggggtcatcttgcgggtctcagagtacattgtcgccagatagatattgttggcgtcgtacttcagaccggtggcccaggcttccgctttggaaccctggccgcgcgccagcaggttctgatcgttggtacggtcagagctggtataagccgcgctgacggcgaaatcactgccgccgaaatcatagcttaaagaggtgccgaagccgtcgccattctgttttttcgcttcacggccttcgtttttgccctgatattgcagggtcatattcagaccatccaccaggccgaagaaatcagtgttgcggtaggtcgccaggccgctggcgcgtttggtcatgaagttatcggtctgcgcggaggagtcgccgccgaactccgggaacatatcggtccaggcttcaacgtcgtacagcgcgccgaggttacgaccatagtcaaatgatccaaactcttttaacttcacgccggcaaacgccagacgggttttctgcgaagaatcgctttcggttttattgccggagaattcggattcccagcggccataaccggtcagttgatcgttgatctgcgtttcgcctttgataccaaagcgaacgtaggtctggtcgccatccttgctgtcataatcgctgaagtagtgcatggctttcactttgccgtacacgtccagtttattgccgtctttattgtatacttccgctgcctgtgaagccgaagaagcaacaaaacccatcatcattaatgccagtgaacgctttttcattatgtggtcctggtgatttatttacacgcgcttatcaattccgggcgaaggccccgtcaaacactggaggttttttaacgctgtagtgttaaatatttatgactaaatggaactttttataaaaaagaatgtttaaatatttccgtcataaatatgtcaccttgcctgcgcagaatgcccgatccgcgcaataaaatggcttgaccaatacgccagcagttggcaagcggcctgactcctgttacaacatcagctcgatctcgatattccttttgaacggcagaaaatcatgagtgatagccagacgctggtggtaaaactgggcaccagtgttttaacgggcggatcccgccgcctgaaccgcgcccatatcgttgagttagtgcgccagtgcgcgcagctgcatgccatggggcaccgcattgtgattgtgacttccggggccatcgccgccggacgtgaacacctcggctaccctgaactgcccgccaccattgcctcaaaacagctgttggcggcagtcggccaaagccgtcttatccaactgtgggaacagcttttttctatttacggcattcatgtcggccagatgctgctgacccgtgccgatatggaagatcgcgagcggttcctcaacgcccgcgataccctgcgcgcgctgctggataacaatattgtgccggtcattaatgagaatgacgccgtcgccaccgctgaaatcaaagtcggcgacaacgataatctttccgccctggcggccattctcgccggcgccgataaactgctgctgttgaccgatcagccgggactctttaccgccgacccgcgcagcaatccgctggccgagcttattaaagatgtctacggcatcgatgacgcgctgcgcgccatcgcaggcgatagcgtttccggcctcggcaccggcggcatgggcaccaaactgcaggctgcggacgtcgcctgtcgcgcgggcatcgataccattatcgccgccggcaaccgcccggacgttatcggccacgcgatggaaggcctgccggtgggcacctgtttccacgctcaggaatcaccgctggagaaccgcaaacgctggatcttcggcgcgccgccggccggtgaaatcaccgtcgatgccggggcgacccaggctattctggaaagaggaagctcattgctgccaaaaggcatcaaaaccgtcagcgggaatttctcccgcggcgaagttatccgaatccgcagtagcgaaggccgcgatatcgcccacggcgtgagccgctataacagtgacgccctgcgcctgatcgccgggcagcactcgcagcaaatcgatgccatcctcggctatgaatacggcccggtggccgtccatcgtgacgatatgattacccgttaaggagctgaaaatgctggaacaaatgggcattgcggccaaagcggcctcttaccaactcgcgctgctttccagccgcgagaaaaatcaggttctgaacaagattgctgattatctggaagcgcagaccgaagacatcctgcgcgccaacgccgaggatctcagcgacgcccgcgccaatggcctaagcgaagcgatgctcgatcgcctggcgctgacgccagcgcgcctgcgcagcatcgccgatgacgtgcgtcaggtgtgtagcctggcggatccggtcggccaggtgattgacggcggtctgctggatagcggcctgcgtatcgaacgtcgccgcgtgccgctgggagtgatcggcgtgatttatgaagcgcgtccgaacgtgaccgtcgatgtcgcctctctgtgcctgaagaccggcaacgcggctattctgcgcggcggtaaagagacctggcgtaccaacgccgcgacggtgaaagtgattcagcaggcgctgcaggagtgcggcctgccggctgccgcggtgcaggcaatcgagagcccggatcgcgcgctggtcggcgaaatgctgaagatggataaatacatcgatatgctgatcccgcgcggcggcgcaggcctgcataagctgtgccgcgagcaatccacgatcccggtgatcaccggcggtatcggcgtgtgtcatattttcgtcgacgattcggcagaggtcgaaccggcgttgaagatcatcgttaacgccaagacccagcgcccgagcacctgcaacacagccgagacgctgctggtacaccgtaatatcgccgataccttcctgcctgcgctaagcaaacagatggcggagagcggcgtgacgctgcacgccgacccggccgccctgccccttctgcagaacggtccggcgaaggtggagccggtgaaagcggagcagtacgacgacgagtatttatcgctggatctaaacgtgaaagttgtcgccgatctcgatgaggcgattgcccatattcgtgaacacggtacccagcattccgatgctattctgacgcgtaccctgcgccatgcgaatcgctttattaatgaagtggattcgtcggcggtatacgttaacgcttctacccgcttcaccgacggcggccagttcggcctcggcgcggaggtggcggtcagcacccagaagctgcacgcccgcgggccgatgggcctggaagcgctgactacctataagtggattggtttcggcgacgataccattcgtgcttaacgctaagcgggtgatgcaaaagtagccgtttgattcgaaagggcattgacgcatcacccacttagttttaaccttctaccccgtgcttcacgcaggtgaacgcgtcctttcagggccgatatagctcagttggtagagcagcgcattcgtaatgcgaaggtcgtaggttcgactcctattatcggcaccatcccctagttttctcaagtcaaccaacatcaacaaaatcctttaaaaacatatatattacgttgttttcagtcatctgaggtcaacccttgtctcttgaaatcaacatgcaattggggcacaatcaggggcatgttctgttcggtctaggaaatgtgccccaatgatgctgaatgcccgtaaggttgaagccgccaaaggaaaagagaagagctataagctcgctgatggcggcggcctgtatcttcaagtagaacccaatggttcacgatattggcgaatgaagtatcgcttcgcgggtaaagaaaaacgcttatcttttggcgtctatccagctgtcagccttgccgatgctaggcaaaagcgcgaagacgcaaagaaattactcgcagcaggtaacgatccaggcgaagtaaagaaagcgaagaagctggctttgacctctgccactgagatagtcaacccgttcaaagaggtagcgttagagtggcacaagatgaagtcgccaaaatggtcagagggctacgcttccgacatccttgaggccttcgagaaggatatctttccccatatcgggcaacgacctattgcggatattaaacccctcgaactactggaggtgctgagactgatagaagccagaggtgcgatggaaaaagcgaagaaagtccgccagcgatgtggagaagttttccgttatgccatcgtaacagggcgagcaacttacaatcctgcaccggatctcgccagcgcaatgcagggccacgaagccgcccattatcctttccttaaagccaccgagttacccgagttctttaccgccctgaatgcctatacaggaagcccgattgttgtgctaggagcacatttacttatcctgactggactgagaacgggtgagctacgcgccgctgaatggtgtgaaattgattttgataacgctctttgggaaataccaaaagaacgcatgaaaatgcgtcgtgcgcatcttgtgccgctttcaaaacaagcattagcccttcttgaaaccttaaaggaactgactggaaactatcctttgatgtttcctgggcgtaacgatcctagcaaatttatgagtgaagcaagtattaatcaggtgtttaaacgtattggatatgcaggacgtgttacgggcatggtttcaggcatacgatgagtacgattctacatgagaaaggatttaacagcgcttggattgaaacccagcttgctcatttggacaaaaattctattcgtggaatttataaccatgcccaatatctcgaagggcgaagagaaatgatgcaatggtatgctaattatttatctgagctagttggtactcataaatgaatgttttaaaaattaataatactgattctctgcttagagattactaccaattagatgaagcttcagaaaaaattggttgtaatgaaaaggatatactctggtttgctagagaacgagatgtagagttatgcatggaatttcatgatgatgagtatgatgtttcatgtggtttgaagatcgatggtcaaatggatgggttcttatctaatctgaaatttttaccacgagacagaaatggcaatattatgttgtcagatttaagctctataagaattcctgatgaaaataatttaattgataagaatggctttattcgatgcttcatatccggtttgtgggctgttgattatgaatataaagatctgttagttaagcatgaagggcaaccggattcctggcctctgcattttctagtagcaggcacacctaatgtaaattgtaaggcaatgctttatgttaattatgatgaaaagaaaattactatctttttgaggttttgtggattacaaaagtacagattcaaaaattcattgatttagtatcatgtgagcaaaagaggataaaaaacaccaacaaatataaatcacaatctgaagcgcaaaaacaaaagcatgcagttcctcgagctgaaatactcatggctattattgcgctctatcatcgtgatatgaggttaagaagagagagtccagcagcgatagctgattatctttttcaacacgccagtgagttctggcctaagaccggagagccgcctttgagctatgatactgttgtaggtttgctacgtagctgcatgaaaaatataaaatttaactgaaggttaacaattgttgtggctaatgattttgggtttttctcattagtcacatttttctcatgtataacatgtgttttaattttccgtgttgaagccaatagacttagataaacggagaatgatgaatgttatccaagcatgacaatactactttgcaacgaccttcaatggattctctgatcgatatgaagtttattacatcagattgcttactaagtgataaatggatttatcggttgatttctttaaatcgtttccctaaacctataaaaataggacggatgtcgcgttggcgcgcagctgattattatacgtggagagatgggttcgaagaaaactctgggcagaaatttgaaggaatgagggaaaaggcaagaaacattaaaagtgggaataccttagcgtctactcccacaattcagtagagtttaattttattaatagccaacggcttagcctttaggctcaattccacgtaattgaagctctttacgtaaaattctcttgatccaagatgccaatgcgttatctccatctttgcgcatttcattttcaagctgcaacctgaaatcttcgttaagacgcatttggaatggaggagagcgtttttcttgtggtgttgacatggtaattaccctaacatatgatgcctacatggtaattaccattgtagggctagaaagcctataaaagcaatgcccgagagtgctggaacaccgctcgagcatttaaccaccgttaaaagaggtaacgaagatggctaaacagaagtgtacctggttatttgctgcgatcaaccgcagtcaacgcaatgctcgtcctgtgatgttaaggaacatcgtagataacgagcggtcagcgcggcgcagactggccccggactacgtgctgagctttgccggtcgcattccttgcggaggtgaacatgcgtaattatccgcaacccggcgaacgctggcagcatgaacgtggctggaccgtaacaatcatccgattaattgaagcgtctccctccgtggcgctggttaatcctgaattcagccgagaagtgctgatacgtcatgacagcgacaaccagctttcttcctgcccgctggcatggtttgaacagcggtatacgcgcctgtttgatgcaccgctctttaaaccttcaccagctccggcaggtggtagtggctccggcccgctgacactgcatccgtctgtggtgtttacccgctggcgggagcgcagcctacggcgttctgctgaacctgacgacaagcactattcaaagtttctctgacaaaacaccgctgaaaacggagtaatccacgatgaatatttcaaacgggcacaacggtgctcagggccactccttgcctgaaaaacactataccggtgcttttgcatatgggttgtcagaggacggtttcggaaaactggacagagccagaaaggcctgcgacatgctgcagcttctcttttctgaatacccgtctcagggcggaacgctggatgcaggctgtgcgccaggcattgccgcgctgatggagtacctgcgggcagatttgacggatattgcgcacagctgcgaactgattgaaggaggcacccaatgaaccagccgcaggtttctatttttccggcagaaatgactactgcgctttaccggcgggctattgcatcggcatgacgccagaaagcgctgactgaaaccggctgcgatcagtatggtccgcacagcctgacggttgaacgtattgaaatggccattgccctgcatattgagtgcgcattgattaacgaatatggcgaagcacagggagcagcggcggcgctggcgctgctgactgacatgctggaaccatcattgctgaccgcgccgccggtactgactgtgcgcggctgtgaagtgatggcggagctgtaccgcacgcttccggcggcctttgatgacttctgcagcacgggtgtggcgctgcataaggggaagtatgacaacacagacggttacgcagatttcagccgccgcgcggggaaatggcccgttattctgcagatgctgcgtattgatgtacctgaaaacggcaggcacggtccctgcccgaaatgtgggggcaaggatcgttttcgcctcgatgaccttgacgggcgcgggacgtggatttgcagccagtgtggcaatggtgacggtctggatctggttaagctcatgaccggttacggcgtcagaaaggccgcgcaggaggtggcgcaggtgcttactgtgccggatgtgcaggaactgcctgttaagcccgccaggcaaaaagccccgagacgcgatatgagtcttaccgtggcggcgctgatgaaagagagccacatgggcgaaagcccctatctgaccggaaaggggtttgccggatatccggcctccctgaccgggagcgtgcagcatatcagcggtaaggattttcctgccggttccctgcttttaccgctcaccaccaacgccggagccgtgaccggtgcgcaacttatcgccccgacgggtgaaaaaagcatactgcccggcagcacgatgaaaggcgcgtttgtggcgctcagcccgttaccgtctgaaccgccggtacaggtggtgattaccgaaggttacgccacggcgctgacggtaagccagctcaccgccggatgtgtagtggctgccatatctgcaggcaacctgcccaacgtggcgcagtcgctgcgggcacgctggcctgaggtaaaaattatcatcgccggtgataacgattttcaggacggggcgagaatcccggcagatcctttgctgaacgggcggcaaaagccgtcggcggctggatgacgctgccaccgggagagattaaggctgactggaatgacttccatcgggagcacggcattacccgtgcccgtgaagcctttcgtaacggtctggagctgtgcggggaaggccgcacgcagctgccgcacgggttccgtcttacccaggaatatctctggtatgaaaaacaggtacagcgcaacggtgagacggaaatccagaacgtcaaaatatgcaacccgctgcgcgtgacggcaatcacctgcgatgccgatggcggtaacttcgggcgactgctggagtgggaagatacgtggggtgaactccgccgctgggcgatgccgatggaaatgctgagcggcagcggtgaggagctgcgccgggtactgctggtcaacggactgtcctatataagcaccaccggtgaggcccgcgcacgccttatggaatatatctctctgtgtaaaccggaacgccgcgtgacctgcgtcagccgcacgggctggcatggtcaggtttacgtcctgcaggatgaggtcagcggtgaaggtgcagagggtgtcattctccagaccacttccgtgcaggggcgcgatttccgcgtgtcgggcacaacggaggaatggcgggagcacgtttcccgctactgcaccggcaactcccgcgtggcgtttgccgtcagtctggcctttgctgcaccattgttacggctggttggtatggatggcggcggctaccacctcaagggggaatcgacggacggtaagaccaccaccatgaaagcggcaacctccgtttgcggcgggcctgactactggcagacgtggcgggcaaccggcaacgcgctggagggatgcgccagccgccgcaacgatgccgccatgatgctcgatgagatccgggaggtggacggacgcgaggcaggcaatatcgcctacatgctggcaaacggtcagggcaagggccgtgccggtacggacggtgagctgcgcacccgtaagcagtggcggctgctgttcttttcaaccggcgaactgtcactgactgaacatgcggcaaaagccggggagcgtacctttgccgggatggaagtcaggatgatccagatccccagcgattccgggaagtttggcgtatttgaggaactgcacggcttcgacagcggcaaggcgctggcggaacatctggagtgggccacgtccagctactacggttcgccgttcagggagtggctgaaagccctgaccgctgatcttaacgggctgacggcacaggcaaagtcactgatgaaggaatataccgccgcgctgaccccgcaagatgcgggcaatcaggtgggccgagctgtgaaccgctttgcactggtggcgatggcgggagaactggcaacccgtctggggattaccggctggcctgagggggaagcgctgcgggcaacccgcgtctgcctgaacgcatggcttaaagatcgcgggcacaccgccaatcaggaagatattgccgcactggagcaggtacgcagtttctttaccgcgaatcagtacagccgctttgcagactggcacgacgagcgcaaccgccccggcaatatggtgggctggcgcagggtggagaaaggcagtaccgcgcagggaacggaagccgtcaccacgttctacgtcatgccgtccggctggaaagaaatctgccggggatttgacccgcgcaaggtggcgcgtttgtgcgcggatcgtggatacctgctgccctccaccgatggcaagctacagacaaccattcgcccgccagagatgaatccccgcagactctatgtcttcaacagcgaggtgccgggttaaggctttgcgtgagtcttatttatttagggtaacaggtgaaacaggtggaacaaccgtattttacaagggctgagcctgttccaccttttgaaatagtgaggtggaacaggtggaacgccagccgatccgctgttccaccttgttacacgcgatgttccacctgtgctgtgaatataaatactttataaaacaatgctgtaacacatgtttcacctgttccaccgcatcagggacataacgcagactgaaaccgaggcatttttatctggctggctttcatagccatgcctgaataaccgcaaacgcccgttgtgccagccaccacacactgagcaccgatagtgcgcttgtgtcagccacgacacaattgacgtaacgaagcaacccgacaggagaagtcatgaacaacccagcagagaataacaacctttccacttttccggctgtaacgcagcgggcactggaaaccctgaacacagccagaagtgcatggcttgaaacacgtcgtcggcagaaagcggctgcggataatattgcaactatccgccagcgccgcgctgaaatggaagccacgacgaacgccctgaatgaggagtggcgcacgttgtttcgtgaaagccagggcgtagtctcaaaggaaatgaaaaaactgcgcacggaaattgcgctgggacgagaaacgcttgaggattttgatgaactgctggcagctcaggaaagcgaaaatgccttattaccgcaggaagccggggaattagccgggcagtatatcagcgcacataacacccttgtggaaattcgcgcaaagcaaatctgggaagacttcatgcagtcgcatggtaaggcgttaatccagacactgagcctgctcaaaaccacaatggggcgggaagccagtgccgttgtgggtgtggtgaattcagttaatgacccgggcacagtactgaaagactttattcacaaacatatcaccaaaccggctcttactaacgctgcgatgccggaacaggaccctgtgtttaaactggcaggtgttgcaccggattatgctgcccttgctgatttccgcaaacttccctctccggcggcccttcataaaatgaagatccggcaggaacgtgaagaactgcaaaaacgtaaccgagccgcggagggtatctgatggcacttaaatgtcccgaatgcggcactacggcacacgccagaacctccgcctatgaagcaccatcggttaaacgctcatggtatcagtgccagaatcttgaatgttcctgcacatttaccgcactggaaagtgtggatacgataattatgaaaccccgtcgtaatgaacaggaatcagacaaagtacaagtgccggaaaaacaactgaaaacgctcaatcgctatggctctgcatcaaagttatcaagccgccagcaaatccctgtctaattagcaaaaaacgcttacctaatcccggcccggcaccgggattttttacgcctttttcctggctgacctgagagcgcatgagtgcatgtctatggcgcatgaaaacgcatgagtctaatgcatcatttttgacgcgaaagcccttgtgtggcggttcctgaggctatttacggggtgcatgaaaaccattctgttaagcgaagcgggcaggcgtgggggctgcgcacgctgactaattttgtttaattgtttgatgctgctttctggattgaagtaagtctgtaatgatatgatcatgaggggcttttcaaacaattttaaatgcctttaaaccaggactaaatcatggctagtgcaaaccaactaaaagcgttagtaaaaattttatcgcacgcgatgatcgcaagtttttgactgtagtactacagattgcagctcatgaagcaaagataggtcatggaaaattcgccgatgagttgagattacttgtagaaaaggctaagttacaagctaacgaagggaacaattaccctcgagtactttcgtcgagcactgttgtaataaatcattcctctaatgatctttttactgtttctcatccgactaataaaatttcagatgtcattctttcaaatgacgtcaggaataagatattgcgttttttagaagagaataaaaatgcatctaaaattaggcagtatggtcttgtcccgagaagacatttactactatatggtccaccaggtactggtaaaacattaacggcaagcgttattgctcatgaattacattttcctctttttactgtaaggatggattctcttataacgaagtttatgggagaaacatcgtctaaactacgaagtatttttgaatatatcaatatgaatagaggagtctatttgttcgacgagttcgatacaataggttcaaaaagaagcatgcataatgatgtaggtgagattcgccgtgttttaaatacttttttgcaattattagatgagcatcattctgatagtttgattattagtgcgacgaatcataaagaaattctagatagtgctttatatcgtaggtttgatgatgtgatcgaatattctttgcctgaaaaagataatttaattgaattaattaagtcaaaatatcattcttttgaattaaacgtaaaagagtggggaagtttgttgagtagcgctgaggggctaagttactcagaggtttcaaaaagttgtgatgatgcgataaaatttgccattatcaataacttaaataaaatagatcaaacagaccttcaaaaggttttagaagagagaaaagcatataaataattacatagggactgaattatgaaggctcacattaaaatcgacttaccacagcaacttattgattataaaccagttactgggggcccgaaaaagggtaaaagcccggtgaatagaaatgcccactttgcaaaagtgaggcatagtttagagactgctataaatatatataatgaaagaaagaaaacagtggagatgttagtaggtaaaggaaatgaacctcaaaaggtcgtaataacttttcaagaaaatccagaaattaaagaacgaatggttttaaaaagtttagatgcaaatgggatgaaaataatgtctgttaatactatagatggtatgacaatggcaaacgtttctgtgcccgtagacggtttttctaaacttgaaaagattctgaaagaatatgctactgagaatacaaaaaaaggtaatccgaagaatcaaccatttatagaatccatatctaatatagaatatggcaattttcgggctttatggtttagtcaagatgagttccctgatgatatctataagatacacgatcttgagttatggttggactcaagtgatatagaactagaaatacttctgaataaatttgaacaactatgtggtcagttagggataacagttaaacaaggcacgcttagttttaaagatagagttgtaaaaatagtctgtgcttctatgcatcagttaatgctgcttcaacagatgacggagattatttcggaagttcggccctcgaaagctgtgagtgtagattttcttgatttgaaaccagctgaagcttttcagtgggttaatggtatgacttatcgaaaactaaatacattaattcctatttgcatacttgatacaggtatcaactctcagcacccactgcttaatacatttgtaaatcaaaatgcactagttgtagccgaacctcagtgggcgaatagcgatttaaaaggtcatggaaccggtattgctggattagcattatttggtgatcttaaatacgcaatacaatctaaagaattgccgataagtggagttattgagtcagctaaaattttacctgatactggcgtaaacgagcctcaactttatggcgctattaccactgatgctatctacaatattgaagccaaacaaccctcagaacgtcggatatttacgatggctgtgtcctctccaaatactttaagagggatgcctactagttggtccgcagcaatcgacagacttgctgcaggtagtcctgatgatccagagaaaagattatttatattatctgcaggcaacctcccacctaatctaatttctgattatccggatgcaaatattacttattcaattgaagatcccgctaactcatataatgctttaacaattggatattgggcaagcgaagacaatattataacgcccggttatgatgttatagctgaattaactgatctaggtccttcatcgacaacatcaagaatatggaaaaatacctcaccttataagcctgatgtcgtttttgagggagggaattttggttatgataaagatctcaattttacggcaaatttagaagagcttagtttattaacgctctctcatgatttcactcgcggagaatattttagtagcttctctgaaacaagcgcggctacaggtatggctgcatttttcatttctagactatggggtcaatatccaaattattggccagaaacgattcgggcactagttgttcatagtgctacatggccaagaaaattacttgaaagacatgccccattacgtacaaaacagaatgttgaatcccttttaagaatgtccggttatggctgcccaaatttagctaaagcagtatcaagtggcgatcaatctgttaatttgatagttgaagatacaattcagccttacacagttgatggcaccttaaataaaatgattctttactctttgccatggccttcttctgaattagagaaaattggtggcgaggatgtaaagttaagagtaacgttatcttattttgtagagcctaatccaggtgagagaggctgggataataaatataaatatggatctttcggtttaagatttgattttaatagtccaggtgaagagtcaggagagtttgtttcaagaataaacaaaaaattcaaagaggataatcaagaatttgatgctggtgaaagtgattctagccaatggttattaggaccgaccttaaggaatagaggttctattcatagcgatatttggagtggaacagcattagaattagctgacaaaaaattcatagctatttatcctgtaagtggatggtggaaggaacttaaaaaagaaaatagacaatctagcattgcaagatttagcttaattatttctattgaaactaaagaaaacaatttagaaatacacaacgaaattagtcagttattaagagtagatacagaaatagagaacgtaattgaactttaatccgatacaccagccatatggaaatggctggtgtgatcttcatatgttgtaaatctactgatttttggggaccaatagtaggaacgttcataacgtaccttccagtgtatttataacattccctgggggcatttctggggcatttagttattgatttagattttacttcaataaatacaataggttaagtgtttgtttttctcctattatcatctaagaaaatcaatcaattagcgtaaaaaatctaacggattgtatcttcaattatcatccttgataacacttggtaaacgcctttgcgttgtatcggctcaagtattgtacaacgtactggcgggtagttaccaggctcaagcccgaacagcattagaagttttgccatcccttgaagctgaaagagttgccggactctctaaacacgtcacttgaacccttagcgatacgttccgcgcttcgtgcggcgctcaatgatgctacaccttgtgaaaggtcgcagagaataaacaggcgtaatgttgggaagactaaccggatcgggaatgaatccggctctgccacggtttcgatcaccggagtataacgatcacctgataagagaacatgctaaggctttatcctccctgcgaagggattcaacctgcggaagcgctacgcgccgccttttcttatgtgcccaacacggcacgtaatggtcatctattatctgcaccattgtaactttcgttgtactgtctctctgctgtacgttgcgcgctggcagattcagcggaggagatatcatgtcaaaagctaaccaaaaagcagctacgaagcgcaacaaccgtaagattcacgctcgtaaattccgggcagcaccagaggggaaagcctggcttgaaagcgagaggaaatcaagctggcacgagcggctaacaacatgttttagaggtgactgtatgaaaagcagccgttatgattgcaatacattcagagtcataaggatttggacgtggatacagtcgaggaacttaacggaacatacttctatgcggggcgttcaaacctcaccgcctccgagctatttttcatggtcttctgtgaaaatgttgttgatcaacttggtttaggtcttgttgatttcggtgctgtagttgccattgtatctgggcgtaatactctccctacaagggcaaaaccaaacggtgctgaaaagggaacatcatatgcgtctaaagcctcgcgaaaagtgttcaaaaaagcgcagttccctttcggtatcaaactaccttccgttattggtggttatccaccttctacaatcagaatcagggcggttgctaacattggaacatttacgggcagggctattcctgtcgtggggtgggttatcttagcttctgatatctctcaaatcacctatcgcactatccgagactacaacgctatagcgcggggtaacgataagttatggtaaacaatgttgagcagcgcgtttatgagcttgtacggccttacgctggcacgtacctattcaagttcaagaaagtagagctaacacctgaaacggatcttgatactgatttgagtcttgatgagcttgaagctggtgagttaatggataagtttttcgatgcgttcaaggttgaacggggaaactttaaaatagaaacttactatcccgatcagcctgtttcatggaatccatttaagaaaacagagcctgttcctgtaccaggtttcaatgttggtatgctgatcgaatcagctaaagccggaagatggttgtacgaataagaatgcccaagcgcgtgtccctctcttaatgcccgttgaatacttcgttcgtagtgcgtctactttggcctgtgtgatccccaggtaggcgcgtgtgtgttcggtggagcgatgccccaacatcttactaatgacctccaaatcttcgccgagcgctttatcagtcgggaaatgatgcgaacgatggtgttcaattatatcgagtgcgattataatcggtggcgtcgtcacagtgcctgtggcggactcagcccggaacaatttgaaaataagaagcttgcttagcaccgtgtccatattacgtgggtaagatcagccacctgatacgccgctatcattctcgttgttctggtcagactatccgccacctccacttccgaagtcgtaatcgccattcccgcagaacgcagcgccgaaatatccgcggcgatacgctggatgccaaaccagaacagcccatccagcgcattgacctgcaagccgctttccagcgccagacgtaaccgctcgcgcggcgcctttatctcttttgccagctgttgatagggcgcggcggaaaccgcatccggcccgctgcgaataatccggctcacaaagcgataacgaaactcatccggaacggcgctgagatcggctttcaggctgtaaacgcagccgcgcttcttaccattaatcaccacgttcttttgattcagtgccagcgcatggcgtaagcgatccaccagctgcggggcgcgaataagcaataaacgaaacggcagttcgaagctggtggcgtagtcgacattcagcaatgcagtacgcaaacgcgtttcactgttcgccttttcctgctgacattcagcaatgacttccgcccactggcgggtaatacgtggggattcgttgcgctcgatgaactgaaatttttcaatctgatagtcaatacgtccagccattgccgttccctgtggttcaccatctcgctgatagttttcagcagattgcgtccattcgcaagtagcagttcgctttaaatcatcatgcactaacttcaccagggaatattagctgaacaaataaaaatagatgagaaaagacatttttattaattgattaaatgatttaacagaacatttaataagatctatttttcagaaaacgtttatatcaacagttattgttcccaataaaccaggcagctacattgcgtaaaaatagcattactgggatataaaaatggacacaacagaacaagttaatggaacatattattacaatggcaagtcaaacctctcgtcccatgaacttcttttttgggtttttctcgatactgcagccattcattttggagtagatgacatcatgaccattgcgttaatcatgcttggtcaacctataaaaaatacccggacaaaaccaggcggagcgactaaagggacgagcattttgagccatgagttacggaaggttttccacaatgatttaaaagtcaggctcccgacgttaaccaaccaatccatccgtaatcttagatggagctatgttaccaatctgggagcattcgttggacgctggatacccatcctcgggattatttacctgacaggggatgtaatttatgtatcaataaaagcaaccactagatacaacgccattgccagaggagacgataaattatggtagatcaagacaatatcgcggcagccgttctggcatggtatgaaacacaatggaacaagccgacacttacgggcaaaaagcagcaggtgaatgcggatttatcactcaatacgggcgattatccctgggccagagaaagtggcgatgacatcatgaaatcctatttccgtcagtttaatgtgaagcaagatacatttgatttttttaattattggcctcccgaacagggtttcctccctaatttcctattaccgaaatccaaacgcatttctccgcacaaaccggagccgttaacactcgcgatgctcattgcgtcagcacaggctgggagatggctgtatcgttagttgtttgaaaataaagtcccctctcccggatagcggcgcgctgcgccttatccgggctaccggttagtgccaacctgtagccccgataagcgtaagcacgaccggggttttcctcagtcagtgccaacccgtagcccaggtaaacgcagcgcaaacatccttactgcagcacctcaagaatatgatacgccgccttcacccgctccgggttggggtagcttttgttcgccagcatcacgatgccgagatcctgttgcgggataaaggccacgtagctgccgaatccgccggtggagccggtcttatgcacccaggaggccttcaccggcggcgcgggcggcttgaccgccgttaccggcgtcgctgcaagcgccaccttattatcgctgccgttaattactacctcggccgacaccggccagttcagcatctcccagccgagccctgatacattcctccggcacgccagtagcgcgactgcgccagttgaatcccctgccgcagatttttatcctgcacggcctcgctgttcatattcgcaagcacccagtgcgccatatcctcaatgctcgacttcacgccgtaagcctcagcgtccagctgtcccggcgaaacatgtaccgctttaccgtcacgataaccccaggcatagtccttgctctgggcgggcggtacgttaatccaggtgtggctcagttttaacggctgcaatacccgctggctcatcgcctgttcaaaactcatgccggaaggtttcaccgccagcgcgccgaacaggccaatgctggcattggcgtacaggcgtttactacccggcgcccactccggttgccagttctgatagtaacgcagtaatgccgcttcatccgtcacctcgtccggaacctgcagcggcagaccgcctgcggtataggtggcgagatgcagcagcgagataccctgccactgcttgccggtgagctgcggccagtacttctgtgccggatcgctgagcttaatttcaccgcgcgccaccgcatcgccgcccagcacgccggtgaaagtcttactaacagagcccagctcaaataacgtctgtcgcgtcaccggacgttggccggcgacatcggcctggccccaggtgaaatagtagggtttgccgtgatagatcaccgccaccgccaagcccggtatcgcctgttctttcattaacggcgtgatggtctgattgaccagttcgcgcagctgctccgccgtttgcggcgcggcaaaagtcgaaaatgaggcgcccagcagcagtacgcctgtaagggattttttcatcatgaagtatttttccattatcggttctcgctcaatatccattctcgtccgggcccttcagacgcgctcagtgtcggtgttttgcactgcgctgacaaactgttaaatttagcagcaggctttagtttttctaacggataatgttatgacgcgcagctatcttcctctcaattcactgcgggcgtttgaagcggccgcccggcatctcagttttacccgcgcggcgattgagctcaacgtcacccactccgctatcagccagcatgtgaagacgctggaggaacatcttaactgtcagctgttcgttcgcgtgtcgcgcggcctcaagctcaccaccgaaggcgaaggcctgttaccggtactcaatgagtcgtttgaaaggattgccgggatgctagaccgtttcaccggtcaccaggcgcgggagaagctcaagatcggcgtagtcggcactttcgccacaggcgtgctgttcccgctgctgccaaccttctggcgcgagtgcccgcatatcgatttgcagatatccacccataataatcgcgtcgaccctgccgccgaggggctggattatgtgattcgctttggcggcggcgcctggcacgataccgctgcgcagtatctgtgcgccgccccgctctccgcactgtgcgccccgtcgttagccgcccggatacatcatccgaaggatattttgcagtttaccctgctgcgatcttatcgccgcgacgaatggtcggcgtggatgcaggcagcgggagaacttccgccttcgccaacccatcgggttattgtcttcgactcatcagtgaccatgctggaagcggcgcaggcaggcttaggcgtggctatcgccccggtaaaaatgttcagccatctgctggaagaaaaacgcattgtgcagccgtttaagattcatatcgatctcggcaactactggctgacgcgtttgcaatcgcgtccggaaacgccggcaatgttgcatttttcccgctggctggcggaggccttaaaaggggttaattcggcggagtaatccgccatcagaaggcgctcccgaaggaaacaggaaacatttggaaataacgcttacacattatgcatagcgccggataaatcagcgtttttaatttgccttgcacagcgcataaacgtttacccctgagaaataaaaaacaacaaaataaaataaaaacaatgagttaattaacaccaattccccacaatatcctctccagccacccgctgaccataaaattattatcgttgccgttatcagataagtccgatcaagtgcatcgtttatgtctattaattttctgtaattaagtcaccgaagcaatcaaaacgcgaaaactgttgctgtatatttcatcgcgatcaacacgccaacataggttatctggatacccatctgcacggtattcgcttgccgtgtttgattaccactatggttatccccttaagtacatggagttaaaatgaataagaaattactgcctgttgtagcactgatcctgtccgcgtccgccaccagtgcttacgcagttaacggcaaggtcaacttcaccggtgaaatcatccagtcaacctgtactgtgacttctaccgaccagaacaaagacgttttcatcggtaaatacccgactaccgcgttcaacgctgttggcgatgttaccgcttctaaagcgttcaccatcaacctggaaaaatgtgaagccggtgattactccctgcgcttcgacggtgcgaccgttgccggtaacccgaacctgctgtccgttgataacgcgaaaggcgtaggtatcgaaatcctgaccaacgacgaaaaaatcgtcccgatcaaccagagcgcagacgacaactccccgtgggttaacgttgcagcgtctgacgacaacagcggcactgcggtattcaatctgaaagctcgctacaaatctttcctgaaaaccgtggaagctggctctgctaacgcaaacgccacctttaccatcgagtacaaataattacggataaatgtttttggccatggatggccggtaccattatttggaacgtgaaatgaaaaagttattaaccgctttattgttatttgtctcgctggatacttttgcgggtattcaggtcgatcagactcgggttatttataacggcggggaaaaatctgcggcgttatccattcacaatgataccgatgaaacatggatggttcagacctggcttgataccggtgacgccaccgcaacgccaaccaatttaccgatgcaggctattccgccgattttaaaactggcgggcaataaagacgctattttgcgctttgtttattccggcagcggattaccgaccgaccgcgaaaccgtgtactggattaacgtgcaggaaattccgccttctgcgaaacaagaaaacgtactgcagattgcgatccgtacccgcgtgaagttgttctaccgccctaccacgctgaaaaccaccttacaaaaggaagcgcaggccctgacctggcgtaaacaaggtaacgagctggtcgtgactaacaaaggtccgctgcacgtgactttcggcgtactgacgctgaagagcggcgcgaagacctggaaagtgaatgctgacatggtcaaacccatggactctctgaacatcaaattgccagccggcgcggcggcagcggatcagatgtcattcacttttatcaatgattttggcggacatacggaaattaaagatatccgcattcagtaagagagcaatacaatggctagccataataaaataaggacgatccctggatgtctggcgcagcacgttcgctttgctgtttacgcctcgacaatgtcattactggcgacaccatttgtcaatgccgaagagcaattcaatacctctttcatccgcggggcgaataacgcctcgctggtgcaaaacctctctaccggcgacgatattttaccgggtaaatatgccttcgatatttacctgaataaaaatcgcgtcgatcaccgggaaatcgaatttaaaaaagatacgcctaacaccccgggctatttctgtttagatgccgacagctaccgttcatacggcgttctgataccggacaccgccggcagcagcgcctgctacgatctggtaaaaaatattccaggcagtagcgtgagctggaacgccgcgctgcaggagctgaacatctccgtaccgcaaaccgaactcgaagcgcgaccacagggcgagatttcgccgctggtctatgacgacggtattaacgccggtttcgttaactacgctttcagcggcagccactcccgtttttccagcggcagcggcaaacaggacagcgactactacttcctgagcctcaataacggccttaacgtcggcgcgtggcgttttcgcaatacctcctccctgtcaaaacagaccgggcaaaaagagcagtggaacccgatttccacctgggcggaaaccgacatcgcctcctggcgcagccgtattcagattggccagagcaacaccaataataacgtgttcgatagcttccagttccgcggcgcgcagatttccagcgtcccggaaatgctgccggacagccgccgcggctacgcgcctgtcgtacgcggcgtcgccaacaccaacgcccgcgtcgaagtgcgtcagaacggctacaccgtctacagcaccgtggtgccgccggggccattcgcgctgaccgatatttcgccaagcaccctcagcggcgacttagccgtaacggtcatcgaggcggatggctcacgccatagcttcaccctgccttactcctccgtaccgaatatgctgcgcgacgggatctgggagtatcaggtgaccgcgggtaaatatcacgacggcaccaataattatcagccgcaatttatccagggcaccgtcgcgcatggcgccggctccgactatacgccatatggcgggattatcatggccgagcactatcgctccggcgtggtcgggttgggtaaaaacatgggcgaatacggggcggcctccgttgacgcctcatggtctgataccgatctggcttccggcgagaacaagcgcggcgccagcgtgcgcttcctctattccaaatcgctcaataccctcggtaccgatgtgcagatcgccggctaccgttattcgacatcgggcttctatgacttctccgatgcggtagctgaacgtaacaactggcagaacggtttctaccacacccagtattacgatcagagcgacgataaaaccggcgcgccggattgggcgacgcaaaaccagcgccgtcgttactacgactcgcagcaatacaacaacaaacgccagcgcgtcgagatgacggtcaaccagcacatcgccggcgcttcgttgtacgcgacctttattcgtcagaactactggaacacctccgcttacgaccgcaccatccagaccggttttaacaccacctggaatcgcgtcagcgtcggcgtgttttaccagaacagccgcagtaactacggctatagcgacaacagcgttaacctcaacgtctcggtaccaatcaacatctttggcccggaccacgaaagcacggttaactttaacgccaccaacagcaaacagagcggtagcggctatagcgccgggatgagcggcacgctacttgatgacaaccgtatgaattacttcgtgcagagcggccacacccagcacggcggcgataccagcctggtcaacctgggttatctgggcagcatgggtaacgtcgatctgggctacagctacaacaacaactatcagcagacttcgctgaacgtctccggcggcgtggtcgcgcactccggcggcgtcaccctgtcgcagccgctgcagaacaccttcgtggtggtgaaagcgaaaggggcgcagggcgtgcgtctggaaaaccagcctggggtagcgattgaccgcttcggctacgcggtgctcacttctgcgatgccgtatcgccacaaccgcgtcgcgctgcgtacttcggatattggcaacggcctggaaatcccgctggcggcgaaagatatcgtgccgaccgagcgcgccatcggccgcgtgacctttgaaacgcatctcggccagagcctgcttatccacgccaaactggcggacggcagcgtgccggtgattggcgccaatatcttcggccagaacggcgaacatgtcggcgtggtcggtacccgcggtgaagcctacgtgtccggcgttcagagcggcgaccgtctgcagatgaaatggggcgacgatgccgacgcctcctgcagcctgacggtgccagagttacctgctattcaagccgatcaacccggtggttatcaggtcgtctccctgacctgtaaataacatgaaaggacaattagttatgtcgaagtttaacctcttatcccgcaccgggctgacgctgctggttctctcaagcgcgctgttctccaccagcagcttcgcgctgagctgtaagaggaacggtaccgaagtcagccagattattacgttgaacgatcaaattaacgtttcgaccgctaacctgaagccgggaaccctgctgtggcgttcaccgacgtttacttcgacgtttacctgtaaagataccgagaaccatccggaaggcgaagatgcctatctgtactgggatccgctcggccgaatgcagagcatccataactctttggaggtcggggtgacctatctgagttcggatattaaaccggtgaaaggtagccgtaccgacatcggccctggcacagtctgcgaccgccgcaacgggcgctgccgaccgccagctatctcgcagaccttcacggtgacctattcggtctacattaaggcgaccggtaacccgccgccgtccaacggcaccattaacgataccaacacctatgctatctttcaggttgatggcgtgggcgggctgaataataaagaaggcagtaacttccgagcctatgtgaacgggcttggcaacatccgctttatcgcctgcaacccgaaaatcaccgtctcggcgaacaatggttcaacggtcaacttcggcagcatcccggcgcgcaacgcggtcgtcggcgccattgagaaacaggttccgttcagcgtccgcgccgacctgaccggcgccggccaggattgccaggggcagaccttaatggccagcttcagcacccagcagccaacccaggacaccaataccattctgccatccaacgatagcggttttggcatcctgctctcgcgcgccgatgcgccgacgacctggctttccatgaataccccgacgcagttgggcatgattaacggcagcgtggtagaaagcaacttcctggccagcctgaaatggctaagcgttaagccaaaaatcggcacctttaatgcgacggccaatatcgacgttacctttaaatagtgaagcaaaatgccgctgaccaacaccgaaccgaccgggttacgctatgtatttcagccgatgttcaaccgcgaaggcaaaatgatcgcggttgaatgtttgacccggtttgctcatcacgagcctgctagtccgcaagatatagaacggtttttcagtgaggcatcggaatcactgcgcgcccgcatcctgctcgaacaaattgagctggtcaggcagcatcagcagtggttccgccagaacgacgtcatggtcacactcaacgtcgacgagtcgacgctgcatatgctgcatgatgattttatcgccgagtgtgtgaaaaccatcggctgcctgcattttgaggtcaatgaattttccaacacgctggtgaaacgcaccccgaccatcgatgccctgacggacaaatactccttctggctggatgattttggcgccggttacgccgggttcgccgccctgacggcgcaaccctttcgttttatcaagaccgacaagaacctgttatggagcctgctggaaaagaaaaacggccagcagttgatggactcactcctgcactattttcaggcgaatcagtatcaggtgatcgtcgaaggtattgaaaccgaagcccatcttcagtggctggaaaacatgccgtggtttgccctgcagggcttctctggcgggaacaaaccattgaagccctggtggccagcgtcgagaaataaccccgcttttccccggatatccactcccccgctatccgggctgtccgtcctctcttcaacttattaattttctggcatttttcttttcccacctcgtctgtcctcgcctttcatattgttaacttattgttgctagtgatcacaaaaattaaacaatatggctatttcatacgcatttttcaaaaatgtagatatttttaatttatggctacgaaatgagcatcaccccgactctctgactctacccgaggaatgattctgatgaatgcactgaccgccgtaaaacctcatgctgatgatttggcccacagctacaccggtttttccttcgctccctctgcgcaatcgccgcgtctgctggagctgaccttcaccgccgaaacgaccgcgcaatttcttcaacaagtcgcgcagtggccggtgcaggcgctggaatacaaatccttcttgcgctttcaggtcggcaagatcctcgatgatctgtgcggcaaccagctgcagccgctgctgatcaacaccctgctcaatcgcgcggagggcgcgctgctgatcaacggtatcggcattgacaacgtctctcaggccgatgagatggtcaagctggctaccgccgcggcgcatttgatcggacgttccaacttcgatgccatgagcggccagtattacgcccgtttcgtggtgaaaaacgtcgataactcagacagctatctgcgtcagccgcaccgcgtgatggagctgcacaatgacggtacctatgtcgaagaaattaccgactacgtgctgatgatgaagatcgatgaacagaacatgcagggcggcaattcactgctgctgcatctggatgactgggaacatctcgacgaattcttccgcgatccgctggcccgccgtccgatgcgctgggccgcgccgccgagcaaaaacgtcagcaaagacgtcttccatccggttttcgacgtcgaccagcagggccgcccggtaatgcgctatatcgaccagtttgtgcagccgaaagatttcgaagaaggcacctggctgagccgcctctccgacgcgctggaaaccagtaaaaacattctttccgtaccggtgccggtggggaaattcctgttgataaacaatcttttctggctgcacggtcgcgaccgctttacgccgcatccggatctgcgtcgcgaactgatgcgccagcgcggctactttgcgtattccacgaatcattaccagactcatcaataagggttctcaggcgaaggaattgagcggatgtatgatttcgtgattatcggcggcggcattatcggcatgtcgaccgccatgcagttaattgagatttacccggacgcccgcattgccctgctggaaaaagagtccggtccggcctgccatcagactggccacaacagcggggtgatccacgccggcgtttactatactcccggcagcctcaaggcgcagttttgcctcgccggcaaccgcgccaccaaagccttttgcgagcagaatgcgattcgctacgacgtctgcggcaagatgttggttgccacctcgccgctggagatggagcggatgcgcgcgctgtgggatcgcaccgccgctaacggcctgcagcgcgaatggctgagcgcgagcgagctgcgcgaacgcgagccgaacatcagtggactgggcgggatcttcgttccttcgagcggcattgtcagctatcgcgacgtggcggcggcaatggcgaagatcttcgaatccaaaggcggaacgatcgtttacgatgccgaagttagcgcgctgaaagagcacgccagcggcgtggtagtccacacccggcagggcggtgaatatgaagcatcgacgctgatcacctgctccgggctaatggccgatcggctggtgaaaatgatcggcgttgatcccggctttatcatctgcccgttccgcggcgaatatttccaactggcgccgcagcacaaccagatcgtcaatcatctgatctatccgatccccgatccggcgatgccgttcctcggcgtccacctgacccgcatgatcgacggtagcgtcaccgtcggccctaacgcggtgctggcgctgaagcgcgaaggctaccgtaaacgcgatatctcgctgaccgatacccttgagatcctgacctcgcccggtatacgccgggtactgcaaaacaacctgcgctccgggcttggcgaaatgaagaattcgctgtgcagaagcggctatctgcggctggtgcagagatactgccccagcctgacattaagcgatttgcgaccgtggcctgccggcgtgcgggcacaggcggtatcgccgcagggtaagctgatcgacgatttcctttttgtcactaccgcgcgttccatccacacctgtaacgcgccatcgccggcggccacgtcggctatcccgatcggcgcgcacatcgtcagcaaggtacagaccctgctggaaagccagagcaatcccggacgcacgctgcgtgcggcacgtagcgtagagacactacacgccgcttttactcgttaaccccttaagacaggaagcgattatgcaacttaaagatgcaactctgtttcgccagcaggcgctaattgatggccagtggcgcgatgcgcaaaacggcgacgtgattgcggtgaccaaccccgccaacggccagcagctgggtagcgtgccgaaaatgggcgccgacgaaacccgcgaagcgattgaagccgccaaccgcgccctgccagcctggcgtgccctgaccgccaaagagcgcgctacgcttctgcgccgctggttcgatctgatgatggagaaccaggacgatctcgcccgtctgatgaccctcgaacaagggaaaccgctggcggaagccaaaggcgaaatcagctacgccgcctcctttattgagtggttcgccgaagaaggtaagcgcatttacggcgataccattcccggtcatcaggccgacaagcgcctgatcgtcatcaagcagcccatcggcgttaccgccgccatcaccccgtggaacttcccggcggcgatgatcacccgtaaagcgggcccggcgctggccgccggctgcactatggttctgaaaccagcgagccagacgccgttttccgcgctggcgctggccgaactggcgaatcgcgccggtattcccgccggggtatttaacgtggtcaccggctctgccggggccgtcggcaacgaactgaccagcaacccgctggtacgcaagctctccttcaccggctcgaccgaaattggccgccagctgatggagcagtgtgcgaaagacatcaaaaaagtgtcgttagaactcggcggcaacgcgccgtttatcgtctttgacgacgccgaccttgataaagccgtcgaaggggcgctggcgtcgaagttccgcaacgccggacagacctgcgtctgcgccaaccgtctgtatgtacaggacggcgtctatgaccgtttcgccgagaaactgcagcaggcggtggaaaagctgcgcatcggcgacggcctgcaggacggggtcaccaccggcccgctgatcgatgataaagcggtagctaaggtcgaagaacatattgccgacgcccttgcgaaaggcgcgcgcatcgtcaccggcggcaaaccgcacgcgctgggcggcaacttcttccagcccaccatcctggtcaacgtcccgagcagcgccaaagtggcgaaagaagagaccttcggcccgctggcgccgctgttccgctttaaagatgaagccgatgtgattgcccaggccaacgataccgaattcggcctcgccgcctatttctacgcccgcgacctgagccgcgtcttccgcgtcggcgaagcgctggagtacggcatcgttggcatcaataccggcattatctccaacgaagtcgcgccattcggcggcattaaagcctccggtctgggccgcgaaggttcgaagtacggcatcgaagactatttagaaatcaaatatatgtgtatcggcctttaacaggagagcaggacatgaccagcaataaagcgttaatgcagcgccgtagcgacgcggtgccgcgcggcgtcggacagattcaccctatctttgccgaccgtgcggagaactgccgggtatgggacgttgaaggccgtgaatatctcgatttcgccggcggtatcgcggtgttaaataccggccacctgcatcctgaggtgattgccgcggtggaaggccagctgaagaagctgacccacacctgcttccaggtgctggcctacgagccctacctgcagctttgcgaaatgatgaaccagaaagtgcccggcgatttcgccaagaaaaccctgctggtgaccaccggttcggaagcggtggaaaacgcggtcaaaatcgcccgcgcggcgaccgggcgtagcggcaccatcgcctttaccggcgcctatcatggccgtacccattacaccctgtcgttaaccggtaaagtgaacccttactccgcgggcatggggttaatgccgggccacgtttatcgcgcgctctacccgtgcgcgctgcacggcataagcgatgatgacgcgatcgccagcatccatcgcatcttcaaaaatgacgccgcgccggaagatatcgccgctatcgtcattgaacccgtccagggcgaaggcggtttctacgccgcctccccggcctttatgcagcgcctgcgcgcgctgtgtgacgagcacggcatcatgctgatcgccgatgaagtccagagcggcgcgggccgtaccggcacgctgttcgcgatggagcagatgggcgtggcgccggatatcaccacctttgccaaatccatcgccggcggtttcccgctggctggcgtcaccggacgggcggaagtcatggacgccatcgcgccgggcggattgggcggcacctatgccggcaacccgattgcctgcgccgccgcgctggcggtactcaaggttttcgaacaggaaaacctgttggaaaaagccaatcagctcggcgacaagctgcgtaaaggcctgctcaatatcgccgaaacacatcgcgagatcggcgacgtccgcggcctggggcgatgatcgccattgaactctttgaagagggcgatcacagcaaacccaacgccaaactgacggcggatatcgtcgcccgcgcgcgggataaaggcctgatcctgctctcctgcgggccgtactacaacgtgctgcgtattctggtgccgctgactatcgaagatgcgcagatcgcgcagggactgaagattatcgccgactgttttaacgaagctaaacaaggctaacactcctgcaccggatggcgacgctcatgcgccccgtccggttgcctgtcggtcggattgggcgcaatcgccatccggcaaacggtgccaaaaaacaataaaagggttaatgatggggcaactgtcgcaatcacatgatttaggggcgggctgaaatcacgccacgtcaccatgttatctattgccggcgttatcggcgcaagtttgtttgtcggttccagcgtcgccattgccgaagcgggcccggcggtgctgctttcctacctgtttgccgggttattggtggtgatgattatgcgtatgctggccgaaatggccgtcgccaccccggatacgggctccttttcgacctacgccgacaaagcgatcggtcgctgggcgggttataccatcggctggctgtactggtggttctgggtcctggtgattcccctggaagccaatatcgccgccattattctcaactcgtggatccccggcgtaccggtatggctattctcgctggtcatcacccttgccctcaccggcagtaatctgctgagcgtcaaaaactacggcgaattcgagttctggctggctatctgcaaagttatcgccattctggcctttatcgtgctgggcgcggtggccatcaccggcttctatccctatgccgaagtgagcgggatttcgcgcctgtgggatcacggcggctttatgcctaacggcttcggcgcggtgctcagcgcaatgctcattaccatgttctcatttatgggcgccgagatcgtcaccattgccgccgccgaatcggataccccggataagcacatcgttcgcgccacgaattccgtaatctggcgcatctctatcttctatctgtgctccattttcgtggtcgtctcgttgatcccgtggaacatgccggggctgaagaatgtcggttcataccgttcggtactggagttactgcatatcccctacgccaaactgattatggacggcgtgatcctgctgtcggtgaccagttgcctgaactcggcgctgtataccgcttcgcgaatgctctattccctgagccgccgcggcgatgcgccagccataatgggcaaaaccaaccgcagtaaaacgccgtatgtggcggtgctgctctccaccggcgcggccttcttaaccgtggtggtgaactactatgccccggcgaaagtctttaaattcctcatcgatagctccggcgccatcgccctgctggtctatctggtcattgccgtatctcagttgcggatgcgcaaaatcctgctggcgagaggcggcgaaattcgccttaagatgtggctctatccgtggctcacctggctggttatcgcctttatcaccttcgtactggtggtaatgctgttccgtccggcgcagcagctggaggtcatttccaccggcgcgctggcgatcgctatcatctgcacggtgccgattatgtcgcgctggaaaaagctgctattgtggcaaaaactgccgctacaaaatacgcgttaaccctgttcccggcgcaggccgggaaatgtattcaggagcaagactatgaccgccattccccaagcgacggccattgatggataccgctggttgaagaacgacatcatccgcggcgtttatcagcctgatgaaaaactgcgtatgagcctgctgacgtcgcgctatgagcttggcgttggtccgctgcgggaagcgctctcgcagctggtggccgagcggctggtgacggtggtcaaccaaaaaggctatcgcgttgcctcaatgtccgaggcggaactcctcgatatcttcgatgcccgcgccaatatggaagccatgctggtgcgcctcgccattgagcgcggcggcgatgagtgggaagccgagctgcttgcccgcgcgcatctgcttaataagctggaatccagcgaagctagtgagcgcttactcgatgagtgggatcagcgccatcaggcgtttcataccgccatcgtcgccggctgtggttcgcagtatttactgcagatgcgcgagcggctcttcgatctggcggcacgctaccgcttcatctggctgcgcaccaccgtgctgtcggtagaaatgctggaagataaacatgtccagcaccagacgctgctggaagccattctggcgcgcgatgccgagcgagccagcgcgctcatgcgcgagcacttacttaccccatcccgattatccagcaggcgatggccggcaaactgctgtctcagcaatcctgattcaggcagcgggctttttataatacggcagttgtgtgaccggatactcgtagtgttcctccaccacgcaacggtccggcgtcgccattcccgagtagaagaaaaagtactcctgactgtccgggaaaaagaccagatcgtcaccgttgcgaaagctggttacccgatagggaatatgatttttggtctgcgcctgacgcatgccggaagccacctggaaatggtcgccccacttcatggtcgatagctggtaatggaaacgcgagatggtcacatttttgcgtaaagagcaggacaattttaccgctgtgccggcgaaagccggagaaaagaagaagcttaataaactgatagataatagaaatttcatgaaggtcttataattttagggtcaatatttgacggtaacatgatttgcctgcgcagacagggatcgcggcgcattttcttgccgccgcaccctattccaggaatattcctaattattctcgccgcgtagcacctcgcgaaaatgcatcaccaacgggcgctggttggctttgtgccataccgcccacagctgggtcgaatagctcatccacggaatttcccgcagcacgacccctcaggggcgttatgccgcaggctgttctggatcagcgccacgcccagtcccgccgccaccagccccagggccgttaatggctctccggcttccagacgaatatccggattaaagcccgcacgcacgcaggcggcgacgaaatcatcgcgcgaatgggcatcgtcgttatggataaccgcgatccactgctgatcggccagctgcgcaggctgcaagttttccgcagcggccagcgggtgattatgcggtaatgccagcagcatccggtcatcaagcacctgagtgtactccagatcctgttcgcccgccgaaggcggcatgtccaccagcgagaaatccaggctgcgctggcgcaggccctcgatctgcgtggcgggcggctggctatacagcgcgatatgcacgtccgggcgcgacgttcgcagggtgcgcagcgcggtagaaagcacgccggagtgcatggcgttttcgatataaccgatacacaacccgccatcttcgccgcgccccagccgtttacctaatgattcgagacggttggcgtgggtcagcaacgagcgcgtttcggccaaaaacgtctgcccgtccgccgtcaggcgaatacgctgctggttacgttcaaacagcatcagcccaaggcgctcctccagctgggctatctggcggctgagcggcgactgcgaaatatgtaagcgttcggcggcacggccaacatgctcctcttccgctaccaccacaaagtacttcaactggcgtaaatcaatcatgtgagacctcaaaggacttaagtcagacgaattatgtcctatcaagtcataacaccgcaaggtattgtgatctccgtcacggggcgacagcacaagtcgcccgcacagaacccttcccagacgggaacccaatatcgaggacatcttagatgagcatcaaacatattctgccaggcaacattggtttaggcggcgcgccgctgggtaacatgttccgtaacatcccggaagacgaggcgcacgccaccgtcgccgccgcctgggatctgggcgttcgttacttcgataccgctccgctatacgggtccggtctttctgaaatccggatgggcgaagcgctctcgcaataccctcgcgaccaattcgttctgagcagcaaagtcggccgcatcatgcttgatgaaatggaagacccggcgacgcgtgatttcggtgagaaaggcggtctttttgaatacggcctgaagaacaaaatcctcaacgattactcggccgatgccaccctgcgttctattgaagacagtttaaaacggctgaaaaccgaccatctcgacatcgtatggatccacgatccggcgcaggatttctacggcgacagctggctggagcagttcaacatcgcccgtaccggcgccttccgcgcgctgacccgcctgcgtgaagaaggcgtaattaaggcatgggggctgggcgtgaaccgcgtagaaccttgcgaactgaccttagcgctcgacgaaccgaagccggatgccttcctgctggctggccgctactcgctgctggaccacaaacgcgccctgcagcgcctgatgccggaagcgctggaacagaatgtcgatattgtcgtcggcggcccttacagctcgggcgttctcgccggtggtgaacacttcgaatatcagaaagcctctgcggcgatccaccagcaggtggcgcagatcaaggccgttgccgctcgtcatcaggtggacgtgaaagccgctgcgctgcagtttgctctggcccatccggcggtggccgccgtgatcccaggctccagccgtcctggccgtatggcggaagatctggccgcgctgaaagcgaccatcccagccgctttctgggatgagatgcgcagtcagaatctggtggctgataacgcgccgctgccgattcgttaattttagcggggccgcagggcccctcttaaaacaagagagacaacatgaaactggatctaacccataaagtcgccgtggtgagcggctccacttccggcatcggacttggcatcgctaaaggccttgctcaggcgggcgcgaccgtagtcatcgtcggccgtcaacggcgcggtgttgataccgccatggcggcaattaatgccgaactccccgatgcgcagctacgcggggtggtcgccgacctcagcaccgaggaaggcgtcagcgccctgctcgccgccgagccgcatgctgatgtggtggttaacaacctcggcatctttaacgataaagatttctttagcgtgccggatagcgagtggatgcacttttataacgtcaacgtgctttccggcgtgcgcctgtcgcgccactacgcccaggggatgatcgacaacggctggggacgcattattttcgtctcctcggaatccggcgtagctatccctgccgacatgatcaactacggcgtaactaaaagcgccaacctcgcggtctcccacgggctggcgaaacggctcgccggtaccggcgtcaccgttaacgccattctgcctggccccaccttcactgaaggtttgcaggagatgctggcggaggctgctatgcagtctggccgcagcccccgtgaacaggctgatgaatttgtgaagaccgcacgcccaagctcgattatccagcgggcggcggacgtcgacgaagttgcgaacctggcggtatatctcgcctcgccgctctcatcggccaccaccggcgcggcgctgcgcgtcgatggcggcgtcgtcgacaccctggcaatgtaattctaattatctgaaataaagagagaaataaaatggctactactactgtatctatcgaaatcccggctactgtcgaccaggtctggcaactgatgggcggctttgactcgctgcccgactggctgccgttcatcccgaaaagcgtggtgagcgaagggggacgcgtgcgtacgctgaccacatccgatggcggcacggtcattgaacgtctggaagcgtttgataaccgccagcgcagctatagctactcaatcatccaggcgccgttcccggtagtggattacctctccactatcgcggtagtggcaactgccgatagcaatatcacccgcgttgagtggtccggcagcttcacgccggttaacgtcagcgacgcggatgccgaagcgctgttcagcggtatttatcgcgacggcctgcaggcgttgaaaaataactttagcgcctgattgttgccaggaatggccgggccattccttttatgaacaaaacaagaaaagtctattgcccgttgccctctttttcagacaacgggcgggacatatcctttacgccattacgttgcaacgggcaacgttaacgaaacaacttaccaggattatgaacatgaaaaccgtatcgactattttttccgcagccgcactttcactttttgcctttaccgcttccgcgcatagcgtcactgcgaccggtaatacgcttgactccgctgaagcggtgattgccaaaaaagcgaaagagctgaatgcgactgattataaaatcaccagcgcccatatggggaataaggtgacgatgagcgctgaactgtacaagtaaaatcggtcactcttcagagccccggcgactcagcatcttgagttggccggggctaagaattctcactctccagccgccgattgtttcacttgcaattaaccctgtcccttgcattccccactgcttttacgctcatcaacaaataatacttcggtattaatcccctctatcccgcttaaataactcgcataaagaacattaaaaagcagatttatttttaaactgagattggtcgacactgcccaattcatagtctacaataatgactgatatctatttattgtaaatgtgaatgattaccaggctttccagttagttaaaaaaacagcataacgatgtttaaataactcattttaaacgagcaaaaaatggcagataacaatataaaaatttatcactcccgttatagcaagttgataaaactactggatttcctcaccgtcaacattttgattttcatctatttaaagtatttttatactgaacctactaccgcttccgcgctcgttggcattatctattcattagtattcataagaattaatgagtattttcatctgtattccgggcaatttaaaggccactatttcacaaaatcagctgcgcttattttaagcgtatgcctgagtagtattgtttcatttttatttttcgttgttgccgagtggttaattaatacgcaatcagtcgttaatttcatcccgctggccgtcagtctggcgaaatgctcaatatttatatttctcattgtctttgtggtgcgggcaatcacggcccattatctgtttaactcggtgttacgggtcgcgattcttggtattacgcctgcgggcctggccattgagcaggctttacaaaaagagtattcacagcgcggtatcatcatcagctattttgaagaccgcaacaaccagcgcgatagccggttgatgagtatcgaaagaaaaggtaactcgcgcgatctgctggctctggcgaagacaggcggtgttgatgaaatttatatcgcgctccccatggttgcgcagcagcgtattaagcagtttcttaatgaattctctgatacaaccgtcgatgtattcctggtaccggacctattctcttacagctcgcatatttcccagctgcgcatgttcggcaatctgcaaactatcagtatctttacttcgccttttgatggcgaaggggcaatcatcaagcgtattgaagatatcattctcggttctttctttaccttggtaagtttgccggcgatgttgttcgtcgcaatagggattaagctgacctcgccggggccgattttatttaaacagaatcgttatggcctcaacggtaaacaaatagaagtatggaaattcaggacgatgcgggtcatggaaaatagcgccgtggtcactcaggcgacccgcaacgatccgcgcatcaccaaattcggcgcgtttttgcgtaaaacctcactggatgaactgccacagtttttcaacgtgctacagggacggatgtcgatcgtcggcccccgtccgcacgcggtggcgcataacgagcaatatcgcgtgctggtggagaactacatgatccgccataaggttaaaccaggcatcaccggacttgcgcagattaacggcttccgcggcgagaccgatacgctggacaaaatggagaagcgaattcagtacgacctggcctacatccagtcgtggtcgctcttcctcgatctcaaaatcgtctttttgactttcttccgaggctttgttggcaaaaatgcgttctaggttcgccgttctggccggtttgctgtctgtgccttacgcacacgccgacctgcaggcaaaaccgcataccggtgttgccggcatcgatttcgagagccagttgggttatgacatcggttacgatgacaacgtgacctggcagcgctacgaccaaaataaaatcggctccagctaccagaatattaagcctgtcgtcaaagctatcggtgaacgttatgaagaccgctacctgttgatgtattccggcgattaccgcaactatggcaacgatagcgcggataatcgcaacaaccatttttttatgtttaacggcaaatggcgatttggcagcatgcacgggctgtcgctggatctcaatgagacgctgggccatgaagagcgcggccgcgacaccaccgaaggctttttgcccgagcagtttaaagagtttggcatcaacaagccgatcggtacccgcttctttaacagcgagctgcgttacatctacggcgcgccggaaggacgcggtaaagttgaagtcgcgctactgcataaacaattgcgttttcgcgacctcgacagcatcaaagacgccagtgatgactttaactattacatgcacgatcaggagtggcatgaaaatagcctggtggcggaactgtttgaccagaaagctaaaacgctgcgctaccgctatagctttatcactaaccagcgccgctacgagctgaatccgttaaaagacagcaatgagtattatctgctgtttggcatgaagaatcgcctgtcgggtaaaacggagattaatggtaacgtcgcctggctctacaaagactttatccataatccggactcacagggttttaacggcctgaactgggatatcaatgccgactggaaaccgctggagcagataaaagttaacctacacagttcccagcgcatcaaagaccccaccgactccggcggctatatcatggtgtcggatttcggcgtcggctatgaacatcactggctggtggatcgtttctcaactctggtcgattattcatatatcaccgaagactataagcatcagagcaataagcgcaaagataagtccaatctgctgtcgctgacctttaactatgatttccgaccatcggttaactttaagctgaagctgcaatggaacaccatgcactcaaataaagatacggacactttttatattggcccggactactcgcatgcggttgaccgcaccctgggctacgacgattcggccattatttttatgacgcaggtacaactatgacctttttaaacaggacactggcgatgcttccgctgctggcgctactgctggcgggctgttcaacaccgccgcagaccattaaaacgccgccggacgccgtctaccttttagaccagggcgatgaagtgaatattgcggtctccggggagcaggatctgacgatgcgggtaaaaatcgataatagcggcagcattgattacccctatatcggatcgctgctgttaaaaggcaaaacgccagaacaggtgagtaatgaaatcgccgataaactgcgcggtaactacctacaggcgccgatggtcacggtaagcatcgccgaataccgcaaagtttatctgctcggcgaagtgaaaaaaccggatggatatgcctgggagccgggtttaacggcggaaaaagccatcgccctggccggcggtttcaccgaccgtgccgaccgtcatgatattcaaattcgacaggcccgcggcggaaagctgctggaaaatgtcgccgccgactcctccgtgcaggcaggagataccatcattattggcatgagtttcttctgatatggcaatttcactggtcgaaaacgcgaaaaagaaagaaggctttatcgacttcacgccttatttcaacaaaattaagcacaagcttatctggtgcctggcggtggtgattgtcgccgccgtggcatcatttattctgacgcgctttatgtcctccagctacacggcgaccgctaccgtgctgttcaaagcgcagtcgcaggacgtctctcctctaccgcggctggaaaactacgactccacgcgcagcgattactacgagactaagtacgcgttaatgggatcgcgagtggtgctcgatgccgcggtgcgcaaattaaagctggagcaggatagcgaatttaacggtggcgataatctcgacgaaaccgcgcgtattaataatgccattcaggcgctgcaaaaaaacctgaccatttccggcgtgcgcaccacccaactggtttccgtgtcgatggaagcgaaatcaccgcagaaagccgccgatatcgccaacggcgtcgctcaggccttcatcgattacagcctgcagcagaagcaaaacaccttgcttcaggcgcagggctggaacgaaaaaatgatggacgacctgaaaaccaaaatggatcagcagaaagcggacatcgataacttcctcaagcagaacggattgctgaccttccgcagtatggatggttatgagaccgagcggctggggattgtgattaaccatctggccgacgccacccagcgccgcctgaaagcgcagacggtatgggacaaggtccgccgccagcagggtaaaccggtagaacagattatctcgctgccggaaatctccggccatccgcaggtgcaggatttacgcattgcgctcatccagacgcggcgcaatctttccgaagcggccaaacactacggcccgcaacatccgaaatatctgcaggcccaggcgcaactgcaggcggtgaatgcccagcttggccaggttttgggcgagctgtttaacggcctgcgccagcagtatcaaatcgccctcgacgatgagcagcactaccaaaaaatgctcaacgatcagaaggccgatttccaggcgctcggcgccaagcgcgaccagtacaacaccatgactaccgcgctgaataaaaccgaagagctttataaatcactgtaccagcgcgctaacgaacaaaaattgtcagagaccttctcggtaccggatgaagtcatttacgacgccgccgtaccgccggatcgtccgtctaaaccacagcgcggcctgttgatcgtaatgattaccctgatggcgctggcgctgtatatcatgtatctgatcgtcagtaccgcgctggataaaacggtgaatagcctcagcgagctcaaagcgaaaaccgccctcgatgccagcggcgagtttccgctactggcgcatctggaaaacgcgcagcagattttccataacgtgctctacgccgatatgatccacagcctacggctggcgttgctcaatcagcgcgataaacccgccaccattctggtgacttcggtgcaatcccgttccggcagttcgtttattgccgaactactggcctgctcagccagcaaatcgcgtaaaacgctgctgattgacctcgactacctggccactcagggattatcggcgaaatttccgcaacataaacagggcttcagtcaattgctgaacggcgagtgcatgccggagcagtccatcgtcaaactggatgatcaactggactttatgccccgcggcaaactcaacgattcttcactgctattgctcacttctgaacgcctgccggcgctgctggcaacgttgcagcagacttacgatacgctaatcatcgacgctccggcgctgaatcaggctcaggatagtctgctgttggcggcacaaagcgatattactctgttggtggtgaaggccggcgagcaggctccgcggatccgcaaagcggaacaacgtctgcagagcgcgggtagtagccgggtggcgagcgtgcttaaccaggtgcgcgaagaacacctggaaacgcaggaaggtaaacgcctgcttgagcgccagatgcacgaactcattgctccgaaatagcgcctatgaatctgattaagagtatttcatccatcgccagttcatcggtgctttcgcagctgatcggcgccttttcggtctggcttatctctcatcgctatgggatggcggaggtcggccattacgcgatgatctacagcaatgtgctgatcggcgcgcaggtttgtacttttgcctcgcagttgctaatccccgtcaggaggatcatgagcttgggcaaaacgtggtgttctgcctgctgcagagtcttctgatggccctcccctgggcggtcatcaccgggcttatcttcgaacttaacattgcgtttctctatttgctgacctttggctatgcgctggtgctggtggcggaaaacctttccctgcgcggcggtaactatcctttcctgactttccagcgcattgcggtgtcgctggtggtcgccattgcgctgctggcgatgcccaacccaacgctgttttatctggcgtggatggtcggcatcctgctgctgctggtcgcctgtctgattcgcctgtttaacttcaaaagcttaacgttgcgccacttttcgattgcgacgaatctgcgttttttacgcgagcactggcagcatatcagccgtgttggcagcgccgaggtactagcgatggccagtaataacctgccgaccatgctgattaacatctggttctcgccgctggtcgccggctacttttcggtggtcagccgtttctgcctgtcgccggtgatgattatcggtaacgccgtgcgcaactccatcttttctaaatggtcgatggattttcgcaaccgtacctttaactatccggaatataaaaaagttcgcctgctgctgctgggcgccgccgcggtgtgcatccttggtatctggattttctatccgctggtgatgcgccttggctttagcgaggagtggctgaattcgatccccacctctcgctacatgctgccttatctgttcgccgcgctggcggtcagtccgttgacggtgatcgaactgatcttcggctcccggcgctacttcctgcgcattcagattgagcagttgctgattatcgtcatcgccttcatcgccttaccgtactttggcgtcaattatgaaatcgccctgctggccttctcgttcctgaccttcgcgcgttacttgttcattttgctcaaaatgaatcagcgggcgaaaacgctttcgctgcaggagcagaaaatatgcagctaaacaccggccgctatctcgaagcgtatgccctgataacgttggtgttctgcggtacggtccagtatttcaccggtatcgcggccgtgctgtggctgccattttttctggtgctggtgatggcggtgctgctcctgatgcagagccgcccgcaaccgctggcgctcaccgggcgggaaaagctaatactggcgctgtatctgacctttaccatactcgggctggtctcaacggtactacagtcaggggtcgtcaccgccatcgtcggctttaaaaacgagctggcgctatcgctgctgatgttctgcatgctgctgggcatgtttagtgaatcacaactgtaccgtctgacgcggcttttctactggatctactatgtgcaaatcccggtcgctatctatcaggtgattttcgtagtgcctaaacgggtagcatttcgcggcgaagatgagaaatgggactcggtggtcggcactttcggcggcgacccgatgggcggcggcaacaccgcggcgatggggatgttctgtctgctgatcatgctcatgaaagtgtcagagtttaagcacggcatctgctcatttaaatcgctggtgatccacatcgcgctgggtttcttcctctgcgtggtggggaagtaaaattcgtcattctgctgtcgccgttcctgctggctctgctgtggatcctgcccggctacgtgagcggcgtgagtaaagttagtctgcgatcgctgctgatcatcgccgccggcatggcgctattaatttttgtcgccattaccgtgttggcctccaactattcctcggctttcggcggcgacccgaccaaaagcgcgctgtcggtgtttatcgattcgctgggctatatttttgatactaactacattatgcccagcggcgaactggggcgttttaccaccctcttcttctggctgcagcataacgaactgtttggtcctggcggcatgctgtttggttacggccttaacgccaccaacagcggcagtaccgtctcgccgggctatatcggcgtctggtatcacctgatcctcgattccaccgccttaagcatgctgctgtgggaagtggggattatcggcatcattctgttcattggcaccatcgcctcaatcctgatcgccatgcggccgaaagagaccttttcgcgccacgatctcaagcttgaggatctgcaactccttagcgcggcgccggcgttctacgtttttgtcatcggctgtctactcagcctgccctacagccagatcctgatgatcatacccatgctacagtttttattatggttatcccttggggcgctgattgtcatccaccgcgctgtccgtcttaactccggtatccactatgaataaaacgccatccattaccgtcagcatcaagaccctgaacgaagcgcagggcatcgagaaaacgatcgatagcgtgcgcaaacagctgcaaccgtacccgcatcaaatcatcgtcgccgatagtttatcaacggataacacccgcgaactggctatcgcgaaaggcgcgatggtggtgtgcctggataacgccgccgaccgctgctgcggtatcggccaccagctgggctggctgtacagcgaaggcgattatttgctactgctggatggcgatatggagctggagccgggctttctggataccgcagtcgaattcctcgagacgcatccggagtacgcgggagtcgccggcagcgtcgagatggatgatgcctcaaactatgagttcaaatcgcgcaagcagcgcctgcatctgatctatccgcagggcgacaccgatcatctgggcggcggcggcctgtatcgtcgtgaagcgatcgagaaaatcggctatctgaccaacctcaacctgcacggctacgaagaagcggagctgggcattcgtttacaggcagcaggttacaaactgcatcgcctggcggcgccctactttagccacgcttcttacaccatgccaacctttaaaatgctggcctaccgttggaaaaacggcttcctgtgggcgccgggcgagttgctccgaaactgctggggtaaagcccatttcccggcggcgctgcggattgtacgtaatgagctgatcttcaccctctatcttctggttttactgatctgtctgctgaccttcaatggcaaagttatcgccattgccctgctgccgctgctggcgtttatcgctctgaaggccattaaaaataaatcgctgcgcgatggcgtgcagagcgccattaacttatcgctattttctgcggggctgctgcgcggggtgattaattcagtgcgcgatccgatgaaacgcccggcggtaaccgtctcgaatccacagcatattgatactgaaaatgaaaattctcttcgttaacaaattcttctttatcaaaggcggcgcggaaaccgtttattttcaggagcgcgacgcgatgctgcaagccggctaccaggtcgtcgacttcagcatgcagcacgcggaaaataaaccgtcgccatgggaagattttttcgtccataacgtcgattaccacgacagccacggcctgatgagcaaaatcaaagccggggtggactttatttataatgccgaggcctgcgcgaaactgaacacgcttttgttgcgcgagcggccggatattgttcattttcataatatctatcatcagcttacgcctgctgttatcggcgtggcgaaacgctttggctgcaaaacggtactcaccgcccacgattacaaaatcgtttgtccttcgtacaccatgctgcgcgatggtcatgtctgcgaagagtgtctgaccgggtcagtgatcaacgcttttcgtcaccgctgccagcagggcgatactttcaaaagtctgctgctatcgttagaagcctactggcagaagttcgccaaaaattacgccatgctcgactgtatcatcgccccaagcgagtttatgcgccagaccctgctgcgtaagctgcccgacgcccgcattgaggtgatcgtcaacggtattgatgccgatagtaccgtgcccggcgaaactgcgggcgactattttctctatattggccgcctgagccgggaaaaaggcgtaccgacgctggcgcaggcgcagcaaaaaatgcgggaggcgatgccgcttaagattgtcggcgacggcccattgggcgcagacctgcgagcacgtttcagcggcccgcagttcctcggctatatgaaacacggcgaggagctgaataatcttattcgcggggcccgcgcggtagtcgttccttctgaatattatgaaaactgctccatgtcggtgctcgaagccatggcttttggccgcccggtgatcggcggcaatattggcggtatcccggaacagatccgtgacggcgtcgacggctatctggttgagcccggcaatagcgacgcgctggcgcaactgatggacaaactggctgcagaccctgagttggcccgcagcatgggaattaacgcccgccagcgactggaagaaaaatacgatctcgcccgccacatgcaggtacttcagacgctttatcaacaacttgtcggggagaaaaaatgaccattaaagtcacggtattaggcactcgcgggatccccgatgtgcagggcggcgtggaaacgcactgccagaatttatacccggaaatctatcgccagggcagcgcggaagtctgcgtgatcgcccgctcgccgtatgtgaactaccgacgcagcgaatatcagggcgttaaactcaagagcctgtgggcgccgaaaagccgtaaattcgaggctattattcactcgacgttggcggcgttcagtaccttattcgacggctccaacgtggttcacgttcacgccgttggccccggcctggtggtgccgttgctgcgtctgttgggaaaacgcgtcgtctttacccatcacggcccggattacgatcggcagaaatggggcaagatggccaaagagatgctgcgtctcggtgaaaaatgggcggtgaaatacgccaatgaagtgatcgtcatctccgaggtcatcaataatctgattaagcataaacatggccgacataacgcccacgttatctacaacggcgtgcgccagaccgacctgccgcccgcggagcaacaggcggcgatcctcgataaatacggtctaaaaccgggccagtatatcgttgccgtggcccgttttgtcgaagagaaagggctgcacgatctcgttgccgcctatgccgccgccgggtgttcggtaccgctggtgctcattggcgatgccgaccacgccgatgaatatagcgagcgtctgaagcagcaggctaccgccacgccaaatgtcatcctcacaggctttatcagcggcgcgccgctgcatacgctgttctcgcaggccgggctattcgtgctgccctcttatcatgaaggattgccgatcgcgctgctggaggccatgtcgtggtcgctgccggtgttggtcagcgacattccggccaaccttgaaattggcctaccgccagcggactactttcccgtcggcaacgttccggctctgacgcagaaactgcaacaatgggtcgcaggagaaaaagcggattacagccagtttatgccgaagtaccgctggccggaaatcgccgcgcaaactgcgcaagtctatcagcgcttaacgtaagcaggtcactcgtgccgaaatctacagctgaactggtggtcgagcgcttttattccgcgcttgaccaggaggtggaaacctcattaaccgcggagcagaagcggggaatcgagcgggcgctggttcgcgctaatctggcgtcacgccatcgcatcgattttcgccacagctttccgttcctgcatcgccgctatttcgtggtatttctttttggtcgggatctgcgcaaagtttcgcgtgaaagtaccctgttcggacgcatattcgcgacgctgctgattacgcttggtgtggtgttcgccctgctgtcgatcctgctggcgctctatatgttgaaatcagcgttaggcattgatgtatttaaaaatttccacgtcggtatctggacgtggtttgttaatcttcatgaccacatgacaaagtgaattgagtatggcgatattatctctgcgtagcacccccctgtttcgcgccctgctactggccagcacgctggcgtcagcatccgttggcgcgcaaaccacggtcatcaccctcctcctttcgacggcctgctcaccaatccgggcatcggcgtcgccagctttcatgatggctatggtgaaaaaccgacccgcgccgagtatcccgataccggttttgaatacgatcgcttctactggagcgagctggaaccccaggaaggggtctataatttcgcgccgatcgataacgcttttagcgtcgccgccagccatcagccagccatgaacgtcggcctacgggtaatggcgctcgacgagccgcaaacgggatcgaaaattcccgactggttgatcgccaaagggatcaagggccagtgggtcgccgacggcaaaaccttcgttccggatctcagcgatccaacttttatcgcctatgcgcagaaactgcttaatgccctcggtcagcgctatgacggcaatccggaactggctttcatcgatatcggtatggtcggatcctggggcgaatggcataactccaactttagcgacattccgccgttaatggagaaatacacgccggagcagctcaatcgctatgttgatatgcatttcgatagcttcccgaaaacgccgaaagtcatgctgattagcggcggcgattcgctggcctgggccagccgccgcggcgcgggctggcgggcggactgctggggcgactggcataacttctccagcgagtggagccatatgcgcgatgattatccgcagcgtctggccgccgcccaggccgcggcgccggggtttgtcgatagctggaaacgggcgcccgtcagccttgagatctgcggctatatgagcgaatggcagagcgtacagcactacacacgcgaagaggtgcaggccaccttcgactgggcgctacagcaacacaccagcagcctgaatctgaaatctcgcccgattccgccggaataccgcgatattgtcgataaagccttactgcgaatcggctaccgtttccgggtcaataagctcgccttcgagaccccggttaaggctggtaagccgttagcggtcagtgttacctggcgtaatgatggcgtcgccccagcctacctgttctacccggtacaatggcgcgtggtcaacgccgctggcgccgcggttacccaggtaaaaacccaggatgacgtgcgccgctggctgccgggggatatgcaaagcactgtcactctgacgctacccgcctcgctgcccgccggcgattacgcgctgcagaccgccatcaccgatgcccagggtaagccgcggcttctgctggccaaccaaggtaaaaccgccgacggctggtatcaactgaccaccttttccattaagtaaacggagaattcatgcctaatgccatcagtcaggtccgccgcgagatcaaacataccggcagtatgaaggcgaaaatcgcgattctgctctatcgcctcgcgacgctgtatcgcagccgcaacccgttttacaagctgctaggcatgccattcgttattctcaataaactgattaacgagtgtctgttttgcgtcgaactaccgtggcaaacgcggatcggctacgggctgaagctgtaccatccacactgcatcgtcctcaaccgcggtaccgtcatcggtgaaaactgtatcctgcgtcagggagccaccatcggcagcctgacggatagcgaaggccgcgaaggggcaagcccggtgattggcaataacgtcgaattcggcgcccacgtggtggtcatcggtccggtgacgttgggtgataatgtcaaaattggcgcggggaccgtggtgacgaaagatctggccgccggtcaggtagtggtcggccagccattccgggtgttgtcaacttatcgcgaagcgcaggaataacggctgaagcgccgtgacctgatgacaagaatcatcgttggcggtcatccgcttcccacggcagaaagcggatgccaaaagccgggtttacgcgcgcaggcgaaccggttcgctgaaatcgtcagccggttcgagtttgagattgaacgttgtcagcagcgccgcggcgcgctcgtggaactcacgcagcgttttttcgagtctttcgcgaacttcagggtcgtcgatagcgacggcttgccagttgccctctttatcaaacaggccgaactggtagctataagtgaaacgagattcctgcgcttccatttccatccaccagccccagaattcccgcttctccggcgctggtttaacattgacgcaaactgccaggcagtcgaaaaagaagcggttctcttcacactgcccttcacggatataggggcctagcgccgtgaattttttaatcagcttactcttcaggtgtccactcggtaacgtcattgcgatctcctttagtgatgcaactgttttaccaaaccaataaaatttagcaatatattaactaaatctatgattgatccagcgggcaatctgacgcaatgcgtgatcgaaattacggtaaaccggcttaaacggtacctccagcagcttaccgtccgacgaggaggaggtgattaaccgcgactcctcttcgggactaaagggatcgtctttccagtagccggaaagcatcggcgtagggcaacggcggcccagcaagccctgagtttttaatgaataacggttaagttcgacacgcagcgcttcgtcggaggcatcgtgcatgccaagacgcgatgccagcacatcgaggaacatctccggcacccgcgccatcagctgcggatccaccagcaggttatgcaccaccggtcccagacaggccaccgccttcagccgctgcgactccagataccccagacgaaccgcaatattggcgccgaagcggaaaccaaatgccgccacccgggtatggtcaacccagggtacattctgcagatgctgtagcacgtactgatgcagcatgctggtgtcctggctcaacgtccacttggttgagaaaccgatggacggcatgtccagcgtcagcatggcgatccccagcggggcaaaatacttctcatacaggctgtaataatcggtttgcagcgaatccagaccgccgcacatcagcaccgtcggaaatgggccttcgcctttcggcatatgcaggaagcccgtcaccggggctccgccggggatagcgaactcgagttcacgcagttcgcccggcagacgttgcgcagcctcttcataggcccgattggccagcgtctgcgcctgatcggccagcccatcgcccttgatatgcgggtaggcggcgatgctatagaggttggaggcgtgcagccagtggcgaccgctctgtaaaggatcggcttcctgagtcgctttttgctgccacatcatcgcttgtttagtccactcatacacccagttgccgccgcgataaccgatcaccgtatcgtagagttccgggtcggagcgctcggcatcgctcatcacgatgcgcgcctggacatcccatatctcctgcggcgagacgccgcgccagatccacatcaggcgattaattaagcgataccagtgatcgacgtgattaccgctcagcgcggtctgcataccctgatgctggccggatgaaaaccgccggaccagcgttgaggtttccgggtatttgaatcggggtttaaacaacgtttcgctaaggttagcctgtgacatgtgccgcctccatcatgttgctgctttcgctattgtaacccgcgtcagggtaaaaaaaaccacgcccggcataaccgggcgtggtaattattcactattggcgggaattaacggccagcgattggcgggacgaagacgaccccatatcccacggctgttcaatccaggtatcctgcgggatatcaaccacataatcatcaaccagcggacggcccgccggcttggcgaaaatggtgacaaagtgcgctttaggatacatttcgcgaatagcaacggcggtgccgccggtatcgaccaggtcatcaataacgatgaaaccttcgccatcgccttcagcgcgcttcagtactttcagttcgcgctggttgtcgtgatcgtagctagagatacatacggtatcaacatgacgaatacccagttcacgcgccagtaaagctcccggtaccagaccgccacggctaacggcaatgatgcctttccattgttcaaccggcagcagacggcttgccagtttgcgggcgtgaatctgcaacatgtcccaggtgacgacgtatttttcgctcatgtgaattgtcccagcctgtgtataacggcttaaatattgttcgaggggaaaatggttgcgcgagattatagagacctgacgcactaaaaaccagtattaagcgcctccggcaacgctttttgcgtgctttacactagcagagcgcgcggaaagtggtattctcaaccacatcgcgcaagcccgagcttgtagtgaatcttattgctaaccctcgacctgtaaacgacttttgcaggtgactgtaaggagactcatcgtgtctgaattgtctcaattatccccgcaaccgctttgggatatttttgccaaaatttgctccatcccgcacccgtcctatcacgaagaacagctcgccgagcacatcatgggttgggcaaaagagaaaggcttacacgcggaacgcgaccaggttggcaacattctgattcgtaaaggcgcgactgccggtatggaaaaccgcaagccggtagttctgcaggcgcacctcgatatggtgccgcagaaaaataacgataccgttcacgacttcaccaaagatccgatccagccatacatcgacggcgagtgggtcaaagcgcgcggcaccaccctgggcgcggataacggcatcggtatggcctccgcgctagcggtactggccgacgatagcgttgttcacggcccgctggaagtgctgctgaccatgaccgaagaagccggcatggatggcgcgttcggtctgcaggccaactggctgcaggcggatatcctgatcaataccgattcggaagaagaaggcgaaatctacatgggttgcgccggcggtatcgatttcacctctaacctggcgctgactcgcgaagcgattcctgccggtttccagagctttaaactgaccttaaaagggctgaaaggcggacactccggcggtgacattcaccttggtctgggcaacgccaacaagctgttgtcgcgcttcctcgccggccacgccggtgagctggatctgcgtctggtcgatttcaacggcggtacattgcgcaacgccatcccgcgtgaagcatacgcgaccgtcgccgtcgctgcggataaagccgatgcgctgaaagcgctggtgagtacttaccaggcgctgctgaaaaacgagttggaggccaaagagaagaacctggtggtgctgctggaagcggtcgctaacgacaaagcggcgctgactcaggcttcccgcgacggtttcatcaacctgctgaacgcgacgccgaacggcgtgatccgcaactccgacgtcgccaaaggcgtggttgaaacctcgctgaacgtcggcgtcgtcaccatgaccgacgacaacgtgcagatccactgcctgattcgctcgctgatcgacagcggtaaagactacgtcgtcagcatgctggattcgctgggcaaactggcgggggcgaaaaccgaagccaaaggcgcttacccaggctggcagccggatgcaaactctccggttatgcacctggtgcgcgagacctatcagcgtctgttcaacaagacgccgaacatccagattatccacgctggtctggaatgtggtctgttcaaaaaaccgtatccggacatggacatggtctccatcggcccaaccattaccggcccgcactctccggatgagcaggttcatatcgagagcgtcggccagtactggacgctgctgaccgagctgctgaaagccattccggcgaagtaagccatacaccggcggcctaccgttaatttgttcaccacgccgcctcaaaatccccggtggcgctaccgcttaccggggctacagtaatgtgcagtttggtagtctccgggaaaatccctggcggcgactggaccgcaacagactctcagcgttatgagataaaagtttttctcaagctaaaaaagtcgcaaaccgataacagtatctattcagccttccccgaaccgcgtttttccattcgatagttggtgaaccactccccacgcgattcaactcgctgctcagcaacgacacaaaacccctgacgaagaaaactggatcgtgccgttatgctcgcatcaaccgacaatacctttcccggatggctggcgcagaccgcccgatgagcgcatggcctattccacgacgggtataatccggcgagacgaataaaaggtcgatatagtcattaacgacggtgataaatccaaccggctgattatcaataaccgccaccagcacttgcgaatgaacaaatttctgccgccagcgggattcatcaacctgcgcccaggcggcaatttgcgcgggagaataatcccggctggcggtctctttaaccgcacgcaaaaaaatggcgcacagcgccggaaaatcatcttctgaatacgccctgatagtgaacatcgttataatccaagaaccagttgtctttccagttgtgggtcgagcagcgtcacgtgtaaccccaccagccgcacgccgcggctgccccgacgctcaagccaggcgttgcgcgcggtcgcaattaaatcttctttgtttaatcgcggccagacatgctcctgagtggtgagctgaaaatcgttaaacttcagtttgatgccctgacgcgcgatcagtagatccggttttaccttcgccaggcggcgctccagctcgggatagagattttcgataatcgcttcgcagtctgaccactcatgaatatcttccgccagagtgcgctcgacgccgaccgatttgcgctgacgatcgttatgaatttcgcgctcgtcaatgccgtggctgcgctcccacaggatacggccaaacttaccaaagcgtttaagcagcatcgccagatcgctgttctgcacgtcgccacaggtacgcagccccatattttccagcttcgccgccgacaccttcccgacgccgggaattttcgccagcggcagagagcgcacaaactccgccacctgatgcggggcaatgacgaactggccattcggcttgttcatatctgaggcaattttagcgaggaattttaccggcgccacgcccgccgaagcggtgagattcagctcacgctcgatggtctggcggatctcctgggccatcagcgtggcagagccgtggcagtgtacgctgtcgctgacgtcaaggtaggcttcatccagcgacagcggctcgattaacgaggtatagcgggagaaaatttcgcggatgtggttcgaggcttctttgtaggcatcaaagcgccccggcagcagcgtgaggtgcggacacagtttaagcgccgtcgccgtcggcattgcgctgcgcacgccaaacttacgcgcaggatagttcgcggtactaatcacgccacgctgtacccgactgccgccgattgcaatgggatatcgcgcaacgccgggttgtcacgcatttccaccgctgcgaagaagcagtccatatcgacatggataattttacgcatcgccttgcccaacactgtatacccatacagcatagcaaaactacacgcaaattttattttttttaattcaactgccaaaaaagctgctacaacataaaagtgaaacaaatcacctttattttcatacatttaaataatgaatcaggaagatacaatcatgaagaaaatactcacggtactctgtctgctggcaaccggcagcgtttttgccaacccgcagctgattgcccaccgcggcggtaccggcgatgcgccggaaaacaccctaccggccatcaaactggcgctggaaaaccacgcgcaggccatctggattacggtacagctaagccgcgacggcgtgccggtgctctatcgctcaagcgatctctccgccctgaccaacgccgagggcaaggtctcaagcttaaccgccgccgagctgggaaaagtcgatgccggctggaaatggggcgatgacagccatccgtggcgcggcaagcaggccacgattccgaccttacaaagcgtgctgcagcagtggccgcagacctttttctacatcgatataaaatcaccggatgccgatccggcggtgatgggcgaacgcctgctggaggtgttaaaaagcacccatagcctcgaccgggtacgggtttattccaccgaagaccgctatatcgcggctctgccgcaaccgattccacgctttgttagccgcagcgaaacccgaaccaggcttgcaaacgtttcgctcagccaccagtgccagcaagacagccagcgcgatggcgataagtggtacgggctggaactgaagcgcaaggtggaggtagtcgagaagtttacccttggtgaaggcgtttctccggcgacactcacctgggataaagaggcgatggattgcttccgctcgcagggccaggcccacatcattttcttcggcatcaatagtgcggatgattatcgtacggcgaaagaactgggcgccgacggcgtgatggtggattctccggcgcaggcgaaaaactggcagtaagataaaaaaggccgcgaaagcggcctgaaaaacgcaagcgtagcgccgtcggcgcattagagaatacgctgctgctggcgctgcgcctcgcgggcgagacgtttcttacgcgcgtcgcacggttccggacagtcgcagaccttctccagccccagcgaggagatcccaccgcagctgccttgaatactcttacgcttcaccaggtagcccagggacatgccgaggatcaccagcgcaaaaatcacaaaggtcgcgacaaataccgtccacatcatcagcctccaaagtcgtcgagcatgatgttctcatcttcgacgcccaggtctttgagcattttaatcaccgcggcgttcatcaccggcggcccacacatatagaactcgcaatcttccggcgccggatgatcgcgcagatagttttcatacagaacattatggataaagcccgtatgcccggtccagttatcttccggcagcggatcggagagcgcgacgtggaaggtaaaattggggttttcgcgcgccagctgttcaaactcatcgtcatagaacatttcgcgcagcgaacgcgcgccgtaccagaagctgattttacgcgtgctgtgcaggcgcttaagctggtcaaagatgtgcgaacgcatcggcgccatgcccgcccctccgccgataaacaccatctcggcgtcggtctctttggcaaagaactcgccaaacggcccggaaatcgtcaccttatcgccaggcttcagcgaccagatataggacgacataatcccggcggcgcatccggtaccttcggcggcggcgtggcgatacgcacgttgagcataatgatgccctcctcttccgggtagttagccatcgaataggcgcgcagggtcggctctttcacatcagagacatagcggaacaggttgaacttgtcccagtctgagcgatattcatcgggaatatcaaagtcggcataggccactttatgcgacgggcattcgatctgaatataaccgccggcgcggaacggcaccgcttcaccatccggcacccgtaatttgagctctttaatgaaggtcgctttgttatcattagagataacctcgcactcccattttttcacgccgaaaatctcttccggcagctcaattttcatattctgcttcaccgccacctggcaggccaggcggcacccttctttggcttcgcgtttggtgatatgcgaaagctctgtcggcagaatatcgccgccgccttctttgatggtcacccggcactggccgcaggagccgccgccgccgcaggcggaagagacgaagataccgttgctggagagcgtgttcagcagtttgtcgcccgccggcgtgcggatctgtttatccgcttcgttattgatttcaataaccacgtcgcccgcgttcaccagtttcgagcgcgccaccaggataagccccgacaggaccagcacgatcagcgtgaacatcaccacgccaagaataatttccatacttttccgcccttatagctgcacaccggagaatgacataaagcccagcgccatcagtccggtggtgataaaggtgatccctaacccgcgcagaccggcgggcacgttggcgtacttcattttttcgcggattcccgccatcgcgacaatcgccagcatccagccgatgccggaaccaaagccgtaaacaatcgattccgggaagttgtaatcgcgctgcaccataaacgacacgccgccgaaaatagcgcagttaacggcgataagcggcaggaagatccccagcgcgttatagagtgccgggaagtacttatcgaggatcatctcaagtatttgcaccagcgccgcaatcaccccgataaaggtaatgaagttaaggaagctgaggtctacgccttccatcaaagcgccgtcgcgcagcaccaggttatagaccaggttgttgatcggtacggcaagacccagcaccaccgtgaccgcaacgccgaggccaaacgcggtggaaacctttttcgacaccgcgaggaaggtacacatcccgaggaagaaggccagcgccatgttctcaacaaacaccgcgcggacaaacaggctaatgtaatgagccatgatcggttactccttttcctgctgttcaggcttccagctacgcagggcccaaatcagcaaaccgataatgaagaacgcactcggcgccagcaggaacaggccgttcggctgataccagccgccgttctgcaccgtttccagtacggtgataccgaacagcttcccgctgccgataagctcgcgcaggaaaccgacgataatcaggatcgcgccgtaaccgagaccgttaccgataccatccataaagctggccagcggcggcgatttcatggcataagcttcggcacgccccatcacaatacagttcgtgatgataagcccgacgaacaccgacagctgcttagaggtctcataggcgaaagcccgcagcagctgatccaccacgataaccaacgaggcgatgatcgccatctgcacgatgatgcgcacactattgggaatatggtggcgaatcatagagataaacatgctggagaacgccgttaccagcgtcaccgcaatggtcatcacgaaggcggtttccagtttggtggtcaccgccagcgcggagcagacgccgagcacctgcagggcgatggggttattggagataagcggccccaccagcacgcgcttcacctctttcatatcgctctgttcagccattattcagctctccctcacgaacctttttcaggaacggaccaaagcccagttcgcccatccagaaatcaaagctatgctgcacgccgtttgacgtcagcgtggcgccggataaaccgtcaaccgcgtggagatcgcctgcgcgcgcgccgccttttaccaccttcagcgacggcatgccgttgtcatccagcacctgtttaccgacaaactgctgacgccagttcgggttttccacctctccgcccagccccggcgtttcgccctgatcgtagtaagtaatgcctttcaccgtgcgcccatcgacgtccagcgccacgaaggcgtacatcattgaccacaggccattgccatagataggcagcacgacttcctggatctgctgctgcgcgtcacgcaccaggtaaatttccgccaggttgctgcggcgtttaatcccggccggatcctggctggcgtcgagcgcgatgctctgctgcggatctttcagcgcctgggcctgattaaatttgcccgggtctttatccagcagttcgccggtcgccagattgaccagccgaggggtaatgcgcgcggcgaaggtttccgccaccgcgtcagcatccatcccctgctgcatcaggccggcgacggccaggatattgcgctgtttatccagcgcgcgttgttcctgctgacgtgacttgaggcccacggcggaaccggcaaccacaatggagcacaccagacaaagcaccagcaccaccagcagcgttttgccgatgctatcgttacttttcttctcagccacgcgacttcctccgcttgatattggcctgcaccaccaggtaatcgaacagcggcgcaaagaggttggcgaacagaatcgccagcatcatcccttccggataggccgggttgacgacgcgaatcagcacgcacatcacgccaatcagcaggccgtagctccatttacctttatcggtaaaggaagccgataccgggtctgtcgccataaacatcatgccgaaggcgaaaccgccgagcaccagatgccagtaccacggcatcgagaacattgggttggtatcggaaccgatgaaattaaacagcgtagcggtggcgatcataccgagcatcaccccggcgacgatgcgccaggaggcgatacgggcaaagataatgaacgcgccgccgatgaggatcatcagcgtcgacacttcgccaatcgagccgggaatattgccaaggaaggcgtccatccagctcaccgggatgccggtggcgacgttaaccagcgcttcaccgccgccgctggcccactgggagagcggcgtcgcgccggaaaaaccgtccgccgccgtccataccaggtcgccggaaatctgcgccgggtaggcaaagaacagaaacgcgcgccccgccaacgccgggttgaggaaattgcgcccggtgccgccgaaaatttctttggcaatcaccacgccgaaggagatccccagcgccgcctgccatagcggcatcgttggcggcacaatcagcgcgaagagaatcgaggtaacgaaaaagccttcgttgatctcatgtttgcgcacaatcgcgaacagcacttcccaaaaaccgccgacgatgaatacggtcaggtagataggcaggaaaaataccgcccccagcgtcatcatgctgagccacccggcatcggcgctgaagctcacccctaaccactgggcaacgctatagtgccagttgttggctattacctgctgtaactgttcggcgccgtatagcttgtgcagcgccggaatagtctgcaagccgacgttatacatgccccagaacatcgccgggaacaccgcaaaccagacgaggatcatcatccgcttgaggtcgatggcgtcacgtacgtgcgccgcgccgcgggtgactaaacccggggtgtagaagatcgtcgccgccgcttcatacagcgggtaatattttgctaacttgccgccgtgcgtgaaatgcggctcaagtttctcaatcaggtgctttaagcccatctcttatccttcctgctcaatctgggttaacacgctgcgcagcgccgggccgtattcatatttgcccggacaaacgtaggtgcagagcgccagatcttcttcatccagctccagacagcccagcgcctgggcgctatcgctatcgccggcaagcagatcgcgcagcaatatggtcggcagaatatccagcggcatcacccgctcatagttgccgatcggcaccatcgcccgctcaccgccgttagtatcagtggagaaattaaagcgcttgcgcttaaagaaatgaccaagggtggtacgggtaatcgagaacttctctttgcccggcatcacccagccaaatagctctttttcacggccttctcgtaccacgctgacctgcaaatggtagcgcccgaggaaggcgtgagggccacaggcgtgggtgccgctcaagactgaaccggaaattacccggttttcatcatccaccagctcacccgccagcagttcatcgaggctggcgccgagacaggtttgcagcagccgcggctgttttacctgcgggccgccaagggcaatgacgcgttcgctgtacagctcgccgtcgaggaacagtctgccgatggcgatgacctcctgatagttgagatgccagacctgttttgtcaggctgaccggctccaggaagtgaatgtgcgtaccgacaagccctgccggatgcgggccgctaaactggttgaatgtcacctgcccggcgggatggccgcccagcttgccgccgctagcctgacagacgtggactttaccgtccgtcaggtgcgtcagcaccgtcagaccggcatcaaaggcttcacgctgggccaggataatctgctgcggttcggccgccagcgggttggtatcgatagcggtgacgaagatagccgccggaacgctacccggcgccggaattttgctgaaaggacgggtacgaaacgccgtccactgcccggagtccagcagctgttgctgcaccgcttcccgtggcaaatcgttaagatcttctaatgcatagcgggtaaacgacaacgcctcattgctgccgtcgacatcaatcaccaccgattgcagcacccggcgctcgccgcgatgaatggcgctgaccaccccgctggctggcgcggtaaaacgtaccccggcgttctttttatcttcgaaaagcacctggcctttttgcacccgatcgccttcgctcaccgccatcgaggggcgcatgccgacgtactcctcgccgagcagcgcgacgcgtttcaccgcaggccgggacgagatttgctgtaatggcatgccagctatgggcaaatccagccctttcgtgattttaatcatatcgttagcaggtatccgtaacctaaaccccggctcaagccgaggccagcattattaatggaatatcagaataagaaaggaatagcggtgccacggggacacaagacgggagagaagcatcctttcttaccctggttataaacggcgggagtgtaacattttgtgagtggcagaagtaggaaaagcgccaataagtgcttctaaaatgcgagctattgcgcaaagttctcactgcgctttgcggcaatattcgctataaaggaacattaaattgtaaacgcagccacaccgtgcttgcgaaaaactgccgtgatgctaatgtgagcgctctaaatccagaaaactctgatttcgggtatctattgccgtcctggcatgtggttttttgttttatcaaggaacaagcagtatgcgcaaaatcgcattctttattgcgatgcttctgttgccgtgcgtgtcatttgctgggttactcagcagtaacagcccgacaacgccggttagcaaagaatataaacagcagttaatgggctctcccgtttatatcgagatcttcaaagaagagcggatgcttgatctctacgtcaaaatgggcgaaacctaccagcttctcgatagctaccggatctgtaactactccggcggcctcgggccgaagcaacgccagggcgattttaaaagcccggaaggattttataacgtctcgcgcagtcagctaaaaccagacagccgcttttataaagcgatcaatatcggcttcccgaatgcctacgatcgcgcgcacggctatgaaggtaaatacctgatgatccacggcgcctgcgtttccgtcggctgctacgcgatgaccgataccggcattgacgagatcttccagtttgtcaccggcgcgctggtatttggccagccaagcgtgcaggtcagcatctacccgttccggatgaccgacgccaacatggcgcgacataagttctcgtactatgcggatttctggaagcagctgaagccaggctatgactacttccagcagacccacaaaccgccggtggtttcggtgatggatggccgctatatcgtcagcaagccgctcagccacgaggttatccagccgcagctggcctcaaactatacgctccccgaggcaaaataacgcccactcgcctggcataattttattccaggcctcattgccggtcagcggctgagtggcgataacggagaccacatcgtttggtgtggtctcacgttgaaaatcaatttccacatcctgatccagcagcttcgccacgccaaacggcgcccgacgggtgatccagtacaggttggttgaacagtacgccattacatagcgcccgtccgataacagcatattaaacacgcctttctcgcgcatttcgcctgccagcgtcgcgatgtacttaaaaacgccaaccatattgcctggcgtgcgcggatagcgctcggttaaacggtgcaacagccagcagaaagccgtttcgctgtcggtctcgcccaccgggcggaaatttccggtcttcagcgatttataacccttgagctggccgttatgggcgtaggtccagtggcggccccacagttcgcgggtgaacggatgggtgttctccagcgccacttcgccacggttggcctgacggatatgggcaatgacggaacaggatttgatgggataatcctgtaccagtttggctatcggcgactgaaagctcggctgcggatctttaaatgtgcgacaccctttcccttcgtaaaaggtaataccccagccgtctttatgcggcccggtgccgccccgcgctgaaccagcccggagaagctaaaacagatatcggtcggcacattggcgctcatcccgagcaattcgcacatagatcacctcatacaacttactgaaacataaaaggcgttattggtgcagtcagtttggacacggccagcgcgcaaaaaccggagcgtacttcatgtacgtgaggattttgagcactgcccgggttcaaaatggctaacaaaatagccttttaagctttaaccatctctttttcgatcaacataatcagaatatgaatcaccttgatgtgaatttcctgaatgcgatcggcgtaaccgaaatgcggtacgcggatttccacatcggcggaacccgccattttgccgccgtctttaccggtcagggtgatcactttcattccctgcgcacgagccgcttcaatcgctttgatcacgttgccggagttgccggaggtggaaattcccagcagaacatcgcctgcgcggccaaccgattcaacatagcgggagaagacatattcatagccaaaatcattactcacgcaggacagatggctgacgtcagaaatagcgatcgccggataaccagggcggttctcgcgataacgccccgtcagctcttccgcaaaatgcatcgcatcgcaatgagaaccgccgttgccgcaggaaagcactttaccgccagctttgaagctatccgccagcagtaccgccgcgcgctggatagcgtgaatgttggcctcgtcctgcagaaagttggccagcgtttccgcggcttcgttcagttcgttacgaataagatcctggtacatgaggataatccttcagtattggttggaataaccctggcagtgtaccggatagccgccgaagcgagaagcagcaggcaacgttatccctcgtccttttgattttacgtgccgcttttccagccaacaatgtgagcaaggttgtaattattttgtaaacacattgctaaaacaaattacatccactacaaccaatacatcacaagtggtcagacctcctacaagataagggagcatttctctatgatgattttgagtattgttgcaaccgtagtgttactcggcgtgctcttctatcaccgagtcagcctgcttctcagcagcgtgattttgctcgcctggaccgcggcgcttagcgtggcggggctatggaatatctggctgctgctgccgctggcgattatcctgctgccgttcaactttgcgccgatgcgtaaatcgcttttctctgccccggcattccgcgccttccgtaaagtaatgccgccgatgtcgcgtacggagaaagaagccatcgatgccggtaccacctggtgggaaggcgatctgttccgcggcaacccggactggcacaagctacataactatccgcagccgcgcctcaccgccgaagagcaggctttcatcgacggcccggtagaagaagcctgtcgcatggcgaacgacttcgaaattacccatgaaatggcggatctgccgccggagctgtgggcgtacctgaaagagcaccgcttctttgcgatgataattaagaaagagtacggcggcctggagttttccgcctatgctcagtctcgcgtactgcaaaaactgtccggcgtttccgggatcctggcgatcaccgttggcgtgcctaactccttagggccgggcgaactgctgcaacattacggtactgaagagcagaaaaatcactacctgccgcgtctggcgcgtggtcaggagatcccatgcttcgcgttgaccagcccggaagcgggctccgacgccggcgcgatcccggataccggcgtagtctgtatgggcgactggcagggtcagcaggtgctggggatgcgcctgacctggaacaagcgctatatcaccctcgcgccaatcgccaccgtgctgggcctggctttcaaactctctgatccggaccgtctgctgggcggcgaggaagaactcggtatcacctgtgcgctgatccccacctcaacgccgggcgtggaaattggccgtcgtcacttcccgctgaacgtaccgttccagaacggccccactcgcggtaaagatattttcgtaccgatcgattacatcatcggtggcccgagcatggccggccagggctggcgtatgctggttgagtgcctgtccgtgggccgcggcattactctgccgtccaacgccaccggcggcctgaaatcagtcgctatggcgaccggcgcctacgcccacattcgccgtcagttcaaaatctcgattggtaaaatggaagggatcgaagagccgctggcgcgtatcgcaggcaacgcctacgtaatggacgccgccgcttcgctgattacctacgggattatgcttggcgagaagccggcggtactgtcggcgatcgttaaatatcattgtacccaccgcggccagcgttcaatcattgacgctatggatattaccggcggtaaaggcatcatgctgggcgaaggcaacttccttgcccgcgcttatcagggcgcgccgatcgccattaccgttgaaggggcgaatatcctcacccgcagcatgatgatctttggtcaaggggcgattcgctgccatccgtatgtactggatgagatggccgccgcgcagaacaatgacgttaacgccttcgataagctgctgtttaaacatatcggccatgtcggtagcaacaaagtacgcagcttctggctgggcctgactcgcggccgcaccagcagcgcgccgacccgtgatactacacgccgctactatcagcacatgaatcgcctgagcgccaacctggccctgctgtcggatgtatcaatggcggtactgggcggcagcctgaagcgtcgcgaacgtatctccgcgcgtctcggcgacgtgctgagccagctgtacctggcatcggcggtgctgaaacgttatgacgatgaaggccgtaatgaagcggatctgccgctggtccattggggcgtgcaggatgcgctgtatcaggcggagcaggctatcgatgacctgctgaagaacttcccgaaccgctttgtcgccggcgcgctgcgtctcgccatcttcccgaccggccgtcactacgatgcgccgtccgacaagctggatcataaagtagcgaaaattctgcaggttccgagcgcgacccgctctcgtatcggtcgcggccagtacctaacgccaagcgaacataacccggttggcctgctggaagaggcgctgctggatgtgatggcggcggacccaatccaccagcgcatctgcaaagagctgggtaaaaatctgccgttcacccgcctggatgagctggccactaatgcgctggccaaagggttaattaatcaggaggaagcctcgattctgacccgtgcggaaaccagccgtctgcgcagtattaacgttgatgatttcgcggcggatgaactggcgaccaaaccggtaaagctgccggaaaaaatccgcaagattgaagcggcataataaaagcattaccacacatcacgacgaaggcggggaatttccccgccttttcttttgccgttactcgccgaagatagcatttttttaacaaaatattccatgccgcctcccgctgctgatatggtattaaaattagcttaatgccctcttcatactggagttcactactgtgcctggcttgaaaattacgttattgcagcaaccgctggtgtggatggatggtcccgccaacctgcgccatttcgatcgtcagttggaagaagtgagcgggcgcgacatcattgtgctgcctgagatgtttactaccggatttgccatggaagcggcgaagcagtcgatgccgcagggagaggtcgttgagtggatgctggcgaaagcggagcagaccaacgcgatgattgccggtagcgcggccttgcagaccgaacgtggcccggtgaaccgctttctgctggtagagcccggcggtaaaatgcacttttacgataagcgtcacctgttccgcatggcggatgagcatcaccattatgaggcaggtactgagcgagtggtctttgaatggcgcggctggcgaattctgccgctggtgtgctatgacctgcgtttcccggtatggtcgcgtaaccacaacgattacgatctggcgctgtatgttgctaactggcctgccccgcgttcgctgcactggcaatcgctgctggtcgccagagctattgaaaaccaggcctacgtcgccggctgcaaccgcgtcggcaccgatggcaacggccaccactatcggggcgatagccgtatcatcagcccgcagggagagattatcgccaccgccgaaccgcatcaggcgacgcggctcgatgccgatctgtcgttggccgcgctgcaggagtatcgcgagaaatttccggcctggcaggatgccgatcctttcacgatcggctaaacacttttcgggagccgctgcgctccctttttattccaccgcgatccgcaaagcgcagtagaccaataacgctgccaatacccagttcagttgccgtccgtacaacaaaaacaggcgctgaaacagatgccccgccagagcccagcatagatttcccagcgcgccaatcgccgccagcagcagactcacgctaatgagccaaatcggctcgcgggtaacaggcaggacaaaggtagagagcgcggtgatgccatacagaataatttttacgttgacgaactgcaggcccaggctcgcccagaaacccaccggctctgtactcagcgcgcctgcccccggtttgcttttggctatctgccaggccagccacaggatatacgccgcgccaatccatcccaatatcctggtaaatcgcgagtcgagttccaccagcgaaaaggttaaagccgcgcaaatcagcatagtgataataaaaccaatgctcatccccgccagcacccgcagactgcggcgtaagccatgggaggtgacgctgctgagggcaagaatattattggggccgggagtcagcgcggttatcagggtataagtcaaaaaagcactaatcaaagctggggtcacttgtcttctccttcgttttggcagacagtacccgaagctattcatttaaaaaaatgaatgttttctgactctgaattcgataatttcgatagttggtggcgaaatggatctgcggcgttttattactctcaagacggtagtggaagaaggctcgtttttacgcgcggcgcaaaaactatgctgtacgcaatccaccgtgacctttcatattcaacagcttgagcaagagcttgccgttcagctgtttgaaaaaattggtcgccgcatgtgcctgaccgaatccggtaaaaaggtgctgccgcacgtccatgaactggcgagggtgatggaaactattcgtgaggcggctagtgaagatggagaaccggctggcgagctgcgcgttgcctgtggggaaaccctgctggcctataaaatgccgcaggtgctacagcgctttaaacaacgggccccgcaggtacgcttatcgctgcagtcgctcaactgttatgtcatccgcgatgcgctactcaacgatagcgccgatttgggcgtgttttatcgggttggcaacgatgacgcgttaaccatgaaaagctttggccagcagtcgctgacgctggtcgcctcgccgcagcatccggcggtcgattttacccgctgcgggcaacatatcccgctgagctttgttatcaatgagccacagtgcgtatttcggcaaatttttgaaagcacgctgcgccagcgcgccattaccctggaaaataccattgagctctggagtatcgaaagtattaagcagtgcgtggcgagcaatcttggcgtcagctatctgccacgtttcgccgttgaggaagagcttaagcgcggtacgctggttgagcttccatttagcgctgttccgctcactattaacgcgctgtgcgcccatcacgccggtaaggtggtcagcccggcaatgcgggtatttatgcagtgtgttgaggaggcgttagggcggattaaatgataattcccccaaacgacgaaggcctgaatcattgctgattcaggccttctgaatagtggcggaacggacgggactcgaacccgcgaccccctgcgtgacaggcaggtattctaaccgactgaactaccgctccgcgttgtgttccgttgggaacgaggcgaatattacggtttccctacatcgtcgtcaacgctttttcttcacttttgaatcgtttgctgcaaaattagcccacccgcctatttttagcgcatattagcggcaatcaggcgcgccacaggcagcttccgcccttcttctgcaccaggtcgagacgcgattcatggtccgccagctcgctatcagaggcataaaccacgcgtaatttactggcggcgcggacaacgcgctgtattccaatatcaccggcctgctgttggccttctccttccatcgaaaacgccatgctggtctgcccaccggtcatcatcagatagacgtcagccagaatctgggcatcgagcaacgcgccgtgcagcgtacgcttgctgttgtctatttcataacgtgaacagagcgcatcgaggctgttacgcttgccggggaacatcttacgcgccagcgccaggctatcggtgaccttacaaaaggtttccgttttctcaatgccgcggttcagctttttgaattcataatccataaagccgatatcgaacgatgcgttatggatgaccagctccgcgccgcggatatactccatgaactcatcggcaacgtcggcaaatgtcggcttatccatgaggaattcatcggcaataccgtgaacgccgaaggcctccgggtccaccaaccgatcgggcttcaggtaaacatggaagttattaccggtgaggcgacggttgatcacctctacggcgccgatctcgatgatcttatgcccttcatagtgggcgccgatctggttcataccggtggtttcggtatcgagaacaatctgtcgtgtaattgcagtgctcatagcggtcatttatgtcagacttgtcgtttacatatcgatttcaattacaggaagtctaccagagatgctcaaacaggtagaaattttcaccgatggttcttgcctggggaatccagggcctggcggctacggcgctattatgcgctatcgccagcatgaaaaaacctacagcgcgggctaccgcctgacgactaacaaccgcatggaactgatggctgccatcgtcgctctcgaagcgcttaaagagcattgcgaagtggtgctaagtaccgatagccagtacgtccgccagggataacccagtggatccataactggaagaaacgcggctggaaaacggcggacaaaaagccggttaaaaatgtcgatctgtggaaacgccttgatgccgctctcggccagcatcagattaaatgggaatgggtcaaaggccatgccggacacccggaaaacgaacgctgcgacgaacttgcgcgcgccgcggcatctaaccccacgctggacgacgtcggctatcagccggaaagctaatttcccccgtcgcgccactgcctggtggcgccaacggccggacgcagctgcgtcttcgccttcccggacttcatcggatttagcgtcagcgggatggttcttttccgcgcgacgatcatttgcaaacatcccaaagccggcagatgagtacttagcattttcccccccaacttcgaccagggcagcacctgatagcgaccatagtgcagcacctcaaaattgagcagcgccagccagtcaagctgtcgcgtcatggtaaacatccggctgttataggggatagtttttcgcagaattggcgtcaccttgcgcaatccaatcaggctcagcggattaaaggcggtcaaaatcatccagccatcgtcaatcagcacgcggtcagcttcgcgcaacagccggtgcggatcgctgcaccatggcagagtatgcgccagtaaacaggcatccacagatttggcggcgaaaggaagagacagcgggtcggctttgacctggataggacttccttccagcgaaacgttcacctggtgggaaatcgcgcaggcttcagtattgatttccgcgctcagattgccaatcttaagtagatgaaagccatataatttagccagccacggtttcatatgccgttccagcgactcgcgatagtattcaccccacggcatactggaccaatgctctggagctgtaattgtatgaggtatccttgccggcttcatcgcaaccttccgcaacgctttgagaggtaatttatgaatcttatcagtattcctgcatttcaggacaactacatctgggttcttagcgacgatagccgtcgttgtgtgatagtcgatccgggcgaagccgcgccggtactcacggcaattgaagaaaacaactggcagccagaagcgattttgttaacccaccatcaccacgatcatgttggcggcgtgaaagaactgcggcaaaagttcccgcaacttgtggtttacggaccggcagaaacccaggataagggaagcacagatattgtatctgatggcgatagcattactgttttgggtcacgaattttctattttcgccactcccggtcacacattaggacatatctgtttctacagcgaaccttatctattttgtggcgatacattgttttccggcggctgcgggagactgttcgaaggtacagcagatcaaatgtatcaatcatttatgaaaataaatgcccttcccgctgacaccctaatttgttgcgcacatgaatacactttagcaaacatgaagtttgcattgagtatcctgccagatgatatggatataaaggattactaccataaagttaaggagttacgcgcaaaaaaccaaaagacactacccgttactctgaaaaatgaacgccgtataaatttatttttacgtacggatgacaatgatttaattaaagaaatatccaaagaaacaaatttgcaacactcagcgcagagatttgcatggttaaggtcaaagaaagatgacttctgagatttaacgcttgtcatcctcggccttcaccgttatccttgctcgtcttttaagcaactattgacacacacatgaaggcacgagcgatattactcgcctctgtcctgctggtagggtgccaggcgtcgaagcacgacggcaccgtagaacagcgagcacagagcctttctgcagctggtcaaggggaagcaggcaagttcacaagtcaggcgcgatggttagatgatggaaccctctatgcgcaagaccaggatctgtggacttccataagcgacgagctaaagatgggaattccggaaaacccccggattcgcgaacagaaacagaagtacttacgtaataagagctatctccacgatgtaactttacgggctgaaccgtatatgtactggatagccgggcaagttaagaaacgtaacatgccaatggaactggtattactacccatagtggagagcgcttttgacccacacgcgacgtctggcgccaatgccgcaggcatttggcagatcattccgagcacagggcgcaattatggtttaaaacagacccgcagttacgatgcgcgtcgtgatgtcgtcgcgtccactaccgcggcgctggacatgatgcaacgtctgaacaaaatgttcgacggcgactggttactgaccgtcgcggcatataacagcggcgaaggccgggtaatgaaggccgtgaaggcgaaccgttcgcgtggtaaacccaccgatttttggtcgctctcgctgccgcgtgaaaccaaggtctacgtgccaaaaatgctggctttgagcgatattctcaaaaacagcaagcgttacggcgtgaagctgcctacggctgatgaaagccgtgcgctggcgcgcgttcgcctcgatagtccggttgagatttctcagctagcggacatggcaggaatgccggtcagcaagctgaaaacctttaacgccggcgtaaagggttcaacgcttggcgctagcgggccaaagtacgttatggtgcctcagaagcacgcggctcaactgcgtgagtctctggcctctggcgacattgccgccgtacagccgacgcagcttgctgacaatacgccgctgaccagccatagctacaaggtacgttctggcgatacgatttccgggattgcttcgcgtctcggcgtcaccaccagagatctgcagcagtggaacaacctgcgtggttcaggactgaaagtcgggcagaatctggttgtcggcgcaggtagtagcgcgcaacgtctggcgaacaacagtgatagcatcacctatcgtgttcgtaagggcgactcgctgtcgagcatcgcaaaacgccacggcgtcaatatccgcgacgttatgcgctggaacagcgataccgataacctgaagccaggtgatcagctaacgttgtttgtgaagaacaacgacagacctgaatcctgatttcagaataatgagaaaggcaccgattccccggtgccttttttattgccagcgttacactgctttatgcgcttcaaacatgatggtatcgctggtaaacgatccatcctgctgtaattcgaagtaggctttaacctccgccgatgcgctctgctgatataagcgaatcgcctccgtcagcgcttcaggcgtgcgcatccgcgcgacccatgagctaaactccagcggcagacgatcggtcaataaatgattgatcgccaggcctgcgtcgttggccagcgccagccactcgccgctggagtaattacgcacgtgcgaggtatcgcgcagcgcttccacggtttgcagccagacatcacgtaccggatgccccggagacatcacgtccatgatgatcatcaccccgcccggcttcagcacgcgtttcacctcgcgcagcgcctggccgacatcatgccaatggtgagcggagtagcggctaatcaccacatcaaaactggcgtcggcaaacggcagcttttcagcatatccctgctgagtgacgatgttggtaaagcctttatcttttgccgcctgagcgacaacctccagcatctggctcgataaatcatacgcggtaacctgcgctacctggccggcagcggtaaagctggcgtgccctgcccgcatcccatatccagcaacgttgcctgcgggtaatcagccagccgttccgccagacgctgcagatcgcgcccggaggcgtgcacggcgctggtcagataggcgcttgcctgtgagccaaactgcttttcgacgttgtcatgatgagagcgtgttgtcattgtgttgtccttcggtggtttgagtaataaagggcagcatcgtgctgaacgcagacctgcctgatggcaggcctgacataccttaattaatcaggcttgccgggactgaattcgactagtagcgggttgtgatcggaggcgcgggtcaccagcacggaagcatcgtgcacgcttaatccacggtagaacacaaaatcgagcgggcgaccaaacgcgcggcggcgctgatcgtcagagaaacgaacttcgcgtaacgacatctcacgcgcaaagcgatacagcgcgttcatccgcgggcggctccaggcgttgaaatcaccagccatgattaccggcccgctgtgatgggcaatctgatcgccaattggcagcagctgtttactatagacatcgacgccaagactaaaattaaccgcatggatattcaccaccattaacagccgtgcatcgggcagcggataaacggtcactaacgccgatttaggcaaacgtaaaataggttcgcgctcgcgcaacggacagcaatagatagggtgagcggaggccagcgtcatcacgccggaaggatgctgcggcaataccagggccggcacctgatcggcggccagatagtttgaagtcgcgaacctgaccagttctggggtggtttgcgcctcctgcaacaggaccagatgcgcgtctttgccgaaatttttgagcactgactgccattcagcacgctgctgcttaaagatattccacaccagcacgcgaattttctcatcgctgcttaacggcgcgccggcgggataaaccggactgacgcccgcaaacgcccccggaggcaagattctctccgcaggttgtccggcgacatagcgcatggcataggtattctttcgcaatttgggcattcaacctcgataacaggaaaccagcccgactgcggctggttcttctgttatagggattttcccatacactttcaatgcaatttgcgagaaagccttatccttcgagagaaacggctgccgaacggcgtggagatctatctaaacgaccgctcagtacgaccagcagcaaagccaccagcacaatcagcgcgccgatccacggcgtctgcgccagaccgtacagctcgaccgtctgtccaccaatgaccgaaccgagggcaataccgatattgaaggcagcgatgttcaaaccagaagcaacatcaacggcgcccggcgtgtactgttctgccttttgcaccacatagacctgcagtcccggaacgttgccaaaggcgaaaatccccatcaccagtaccgttgccagagcggcgtagtgcagattggccgtgaactggaagaccagcaacagcaccaccaacgcagcgaagataaatttcaacgcggcgacagcgccatgtttatcggccagtttaccaccccatacgttaccgatagcgacggagataccataacccagcaggatccaactgaccgccgacgggctaaaacctgccaactcttgcatcatcggcgcgaggaaagtaaatgcggtaaacacgccgccatagcccagtgcggtaatcgcgtagatcatcaacaggcgcggatgagtcaagactttcatctgatcgcgcaggctggcaccggcacggcccggaatattatttggcaccaggatcaggctgctgataagcgcaatgacgcccagaatcgataccgcgaggaacgtttcccgccagccaaaatgctggccgatgaacgtcccgaacggcacccctgttaccagcgcgaccgtcagaccgccgaacatgatagcaatggccgaggcggctttctcttttggcaccaggctggtggcaatcgtcgagccgatagaaaagaatacgccatgcgccaggccggtcagcaggcgggccacaatcaaagtgccataacccggagcctgccacgctagcaggttaccggcggtaaataacaccattagcgccagcaggagctgcttacgcggcatacgcccggttaacgcggtcagcaccggggcgccaatcgccacgcctagcgcatagatggaaaccagcaggcccgcagacggcagcgagatagccagttgttcagcaatggtcggtaccaggccgacgatcacaaattcggtagtgccaatagcaaaggcaccgatggttaatgcaagtagcgccagtggcataatttactccgtagcatcaggattaagatgacacgtagtatgcagggatgtttaaataacaaaaaccatcaaaatctcaatagaattttgctataggtgcaacaatgagagccacgtcagaagagatcgctatcttcgtcgccgtagtggaaagcggcagttttagccgggcggccgagcagctcgggcaggcaaactctgccgtcagccgggcagtcaaaaagctggaatcaaagctaggcgttagtctgttaaaccggaccacgcgccagctaagcctgacagaagaaggcgagcgttatttccgccgcatgcaggtggtgttacaggagatggcggctgccgagaacgagcttctggagacgcgcaccactcctcgcggcttgcttcgcgtagatgccgctacgccggtgatgctgcattttttaatgccgctggtaaaaccgtttcgtgaacgttatccggaaatgacgctctctctggtttcctcggaaaccttcattaatcttatagagcgtaaagtcgacgtcgcaatccgcgcgggtaccctaaccgattccagcctgcgcgcccgcccgctgttcaccagttatcgcaagatcatcgcctcgcctgattatatcgcccgctacggcacgccggtgaatgcggaagatcttgcggatcatctctgcctggggttcaccgagcctgtctcgttaaatacctggcctattgccgccagcgatggccaattactggaagtcggttgcgaaattacctctaacagtggcgaaacgctaaaacagctctgtcttggcggcaatggtattgcctgtctatcggattatatggtggataaagagattgccagcggggagtttgtggagctacttgccgacaagcgcttgccggtggagatgccgttcagtgcggtgtattacagcgacagagccgtcagcacgcgcatcagggcatttattgactttctgagtgaacatgtcaaacagctcccaaaggagctgtaaaaaactatcgtccggcaggggcgtcaaccgcctgccggaatcggtggattaatcccacttcggcgccagaccttccgggcttaccagacggtcgttgcaatccagcgcggcaatcgctttacgatcttcatcatccagcttcagatccagcgctttcaaattgctcgccaggttttcacgcttggtggaagatggaataaccgcataaccttcgcccatcgcccacgccaggataacctgtgccggtgttgcattatgtttcgccgcgatttgggcaatcacttcatctttcagcgccttaccgtaggccagcgtcatataagaggtgatatggataccgtgctcacgcgcccagtcgaccactttacggttctgcaggtacggagacagttcaacctggttggtcgcgatattttcagcgccaacggcagcgatcgcacgctccatcagtggaatagtgaagttagagataccgatctgacgggtcaaacccagtttcttcgcttccatcagcgcagccataaactcttcaacagcaaccgcatcgttcggcgacggccagtgaatcagcgtcagatcaacataatcagtctgtaatttctgcaggctctctttcaggctggcgatcagcttgtctttgctcaggttttcgatccagattttggtggtgatgaacagttcatcacgcggcacgccgctttccgcgatagcctggccaacagcggcttcgttttcatagatctgcgcggtatcgatagtacgatagcccagttccagcgccatttttacagagttgatgactacgtcatcttgcagacggaaagtgccaagaccaaatgcagggattgccatgatagatattcctcattaattattcgtttcgcttaactgaggccattatggttgaaggttgggttgggaaaaagatcgataaatgcagaggatttttgctgattcagcaataattggagatgaagaaacaaaaaagccctaagcaaatgctcagggcttttaataagtggcggaacggacgggactcgaacccgcgaccccctgcgtgacaggcaggtattctaaccgactgaactaccgctccaccgaattttttctacatctaccggtttaatgccccggttttactgcaaatttgatgcctggcagttccctactctcacatggggagaccccacactaccatcggcgctacggcgtttcacttctgagttcggcatggggtcaggtgggaccaccgcgctatcgccgccaggcaaattctgttttcaacacgtcctcaggacgcatcgattaatctgtatcaggctgaaaatcgtctcaaatccgccaaaacagcttcggcgttgtaaggttaagcctcacggttcattagtatcggttagctcaacgtatcgctacgcttacacacccgacctatcaacgtcatcgtctttaacgttccttcaggagacttaaagtctcagggagaactcatctcggggcaagtttcgtgcttagatgctttcagcacttatctcttccgcatttagctaccgggcaatgccattggcatgacaacccgaacaccagtgatgcgtccactccggtcctctcgtactaggagcagcccccctcaattctccagcgcccacggcagatagggaccgaactgtctcacgacgttctaaacccagctcgcgtaccactttaaatggcgaacagccatacccttgggacctacttcagccccaggatgtgatgagccgacatcgaggtgccaaacaccgccgtcgatatgaactcttgggcggtatcagcctgttatccccggagtaccttttatccgttgagcgatggcccttccattcagaaccaccggatcactatgacctgctttcgcacctgctcgcgccgtcacgctcgcagtcaagctagcttatgccattgcactaacctcctgatgtccgaccaggattagctaaccttcgtgctcctccgttactctttgggaggagaccgccccagtcaaactacccaccagacactgtccgcaaccccgatcaggggccaacgttagaacatcaaacattaaagggtggtatttcaaggttggctccacgcagactggcgtccacgcttcaaagcctcccacctatcctacacatcaaggctcaatgttcagtgtcaagctatagtaaaggttcacggggtctttccgtcttgccgcgggtacactgcatcttcacagcgagttcaatttcactgagtctcgggtggagacagcctggccatcattacgccattcgtgcaggtcggaacttacccgacaaggaatttcgctaccttaggaccgttatagttacggccgccgtttaccggggcttcgatcaagagcttctccttacggataaccccatcaattaaccttccggcaccgggcaggcgtcacaccgtatacgtccactttcgtgtttgcacagtgctgtgtttttaataaacagttgcagccagctggtatcttcgactgatttcagctccacccgcaggggcttcacctacatatcagcgtgccttctcccgaagttacggcaccattttgcctagttccttcacccgagttctctcaagcgccttggtattctctacctgaccacctgtgtcggtttggggtacgattcaatgttacctgatgcttagaggcttttcctggaagcagggcatttgttacttcagcaccgtagtgcctcgtcatcacacctcagcgttaaaaaggtaccggatttacctggaacctccgcctacatgcttaaaccgggacaaccgtcgcccggctaacatagccttctccgtccccccttcgcagtaacaccaagtacaggaatattaacctgtttcccatcgactacgcctttcggcctcgccttaggggtcgactcaccctgccccgattaacgttggacaggaacccttggtcttccggcgtgcgggcttttcacccgcattatcgttacttatgtcagcattcgcacttctgatacctccagcaaccctcacaggccaccttcgcaggcttacagaacgctcccctacccaacaacacatagtgtcgctgccgcagcttcggtgcacagtttagccccgttacatcttccgcgcaggccgactcgaccagtgagctattacgctttctttaaatgatggctgcttctaagccaacatcctggctgtctgtgccttcccacatcgtttcccacttaactgtgactttgggaccttagctggcggtctgggttgtttccctcttcacgacggacgttagcacccgccgtgtgtctcccgtgataacattcttcggtattcgtagtttgcatcgggttggtaagtcgggatgaccccnngccgaaacagtgctctacccccgaagatgaattcacgaggcgctacctaaatagctttcggggagaaccagctatctcccggtttgattggcctttcaccccagccacaagtcatccgctaatttttcaacattagtcggttcggtcctccagttagtgttacccaaccttcaacctgcccatggctagatcaccgggtttcgggtctataccctgcaacttaacgcccagttaagactcggtttccctgcggctcccctatacggttaaccttgctacagaatataagtcgctgacccattatacaaaaggtacgcagtcacacccgaaggtgctcccactgcttgtacgtacacggtttcaggttctttttcactccctcgccggggttcttttcgcctttccctcacggtactggttcactatcggtcagtcaggagtatttagccttggaggatggtccccccatattcagacaggataccacgtgtcccgccctactcttcgagttcacagcctgtgcattttggtgtacgggactatcaccctgtaccgtcggactttccagaccgttccactaacacacaagctgattcagactctgggctgctccccgttcgctcgccgctactgggggaatctcggttgatttcttttcctcgggtacttagatgtttcagttccccggttcgcctcgttaacctatgtattcagttaacgatagtgtgacgaatcacactgggtttccccattcggacatcgccggctgtaacggttcatatcaccttaccgacgcttttcgcagattagcacgtccttcatcgcctctgactgccagggcatccaccgtgtacgcttagtcgcttaacctcacaacccgaagatgtttcgtaaaacattttcgtgtcgcgaaaatttgagagactcgaacacacattgactgtgtgtcgtttcaattttcagcttgatccagatttttaaagagcaaaacttcgcagtgaaccttttcaggtacactctgaagttttcttgttttttgcagtaaggatggtggagctatgcgggatcgaaccgcagacctcctgcgtgcaaagcaggcgctctcccagctgagctatagccccatcgaatgaatctcttttaaccttaattcgttttcgggcgcggcgtggtgaagcgaagcatactgaagtatgcgagctttgccacaacaaagcacgagagcgaatttggtaggcctgagtggacttgaaccaccgacctcacccttatcaggggtgcgctctaaccacctgagctacaagcctgcagagattacttactgctgtattttcatcagacaatctgtgtgagcactacaaaggcaggttctttaaggtaaggaggtgatccaaccgcaggttcccctacggttaccttgttacgacttcaccccagtcatgaatcacaaagtggtaagcgccctcccgaaggttaagctacctacttcttttgcaacccactcccatggtgtgacgggcggtgtgtacaaggcccgggaacgtattcaccgtagcattctgatctacgattactagcgattccgacttcatggagtcgagttgcagactccaatccggactacgacatactttatgaggtccgcttgctctcgcgaggtcgcttctctttgtatatgccattgtagcacgtgtgtagccctactcgtaagggccatgatgacttgacgtcatccccaccttcctccagtttatcactggcagtctcctttgagttcccggcctaaccgctggcaacaaaggataagggttgcgctcgttgcgggacttaacccaacatttcacaacacgagctgacgacagccatgcagcacctgtctcagagttcccgaaggcaccaaagcatctctgctaagttctctggatgtcaagagtaggtaaggttcttcgcgttgcatcgaattaaaccacatgctccaccgcttgtgcgggcccccgtcaattcatttgagttttaaccttgcggccgtactccccaggcggtcgacttaacgcgttagctccggaagccacgcctcaagggcacaacctccaagtcgacatcgtttacggcgtggactaccagggtatctaatcctgtttgctccccacgctttcgcacctgagcgtcagtctttgtccagggggccgccttcgccaccggtattcctccagatctctacgcatttcaccgctacacctggaattctaccccctctacaagactctagcctgccagtttcgaatgcagttcccaggttgagcccggggatttcacatccgacttgacagaccgcctgcgtgcgctttacgcccagtaattccgattaacgcttgcaccctccgtattaccgcggctgctggcacggagttagccggtgcttcttctgcgagtaacgtcaatcgccaaggttattaaccttaacgccttcctcctcgctgaaagtactttacaacccgaaggccttcttcatacacgcggcatggctgcatcaggcttgcgcccattgtgcaatattccccactgctgcctcccgtaggagtctggaccgtgtctcagttccagtgtggctggtcatcctctcagaccagctagggatcgtcgcctaggtgagccattaccccacctactagctaatcccatctgggcacatctgatggcatgaggcccgaaggtcccccactttggtcttgcgacgttatgcggtattagctaccgtttccagtagttatccccctccatcaggcagtttcccagacattactcacccgtccgccgctcgtcacccgagagcaagctctctgtgttaccgctcgacttgcatgtgttaggcctgccgccagcgttcaatctgagccatgatcaaactcttcaatttaagtttgatgctcgtgaattaaacttcgtaatgaattacgtatgttcactcagagacttggtattcatttttcgtccgaggacgttaagaatccatgtcactttgagtgcccacacagattgtctgataaattgttaaagagcagttgcgacgcgctttagcgctctgtcgcgaggtggcgtatattacgctttcctctttcagagtcaaccctgaatttcagaatttttctcttcaaccgagccggctgtttgtgtgaagtgattcacatccgccgtgtcgatggaggcgcattatagggagcccgccgggaatgacaagcggaaaaatacatttttatttcaaccgctcatcttttatacgcaacgcttatttttgctgctttttgatagccgcaggcaggtccgccaggctatttagcacccaatccgcggcgctttccgcttctgcggtaaccggcttaccggtacgcaccagcactttcgttccgacattcgccgccgcagccgcctgcatgtcttcgagtttatcgcccaccatataagaagcggccatatcaatatgcaggaaatcgcgtgcggaaatgagcatccccggatgcggcttacggcaatcgcaggtctggcggaactcttcaacgctcccctgcgggtgatgcggacaataatagataccgtcgagatccacgccgcggtctgccagcgaccaatccatccattcggtgagggtctcaaattgcgcttccgtgaatttaccgcgagcgatgcctgactggttggtcaccagcactaacgcaaatcccattgcctttagttcacgcatggcatcaatgacgccgtcgataaactcaaagttgtcgatttcgtggacgtaaccatgatcgatattaatcgtgccgtcacggtcgagaaaaattgcgggtacagactttgccaccggtttgctcctgataaaggctaatgccgttagtatcgcatgtttcggcatgcaagaaagtgctcattataaagagtcagattgatttagacgtctggatgccttaacatccatttcattgacaggcatcgcctggacacggcagaagaaaatgccacggcaaacggctaaacgataataaataactgatgattaaactttcgaatattaccaaagtgttccagcaggggaaccgcaccatacaggcgctgaacaatgtcagcctgcatgtccctgccgggcaaatttacggcgtgatcggcgcttccggcgcaggtaaaagtacgctgattcgctgcgttaacctactggaacgcccaaccgaaggcagcgtgcaggttgataaccaggaactcaccgcgcttacggaaaaagaactgactcgcgcgcgccgtcagattggcatgatcttccagcactttaatctgctcgcttcacgtaccgttttcggcaacgtcgcgctgccgcttgagctggacaacacgccaccggcggaaatcaaacgccgcgttaatgaactgcttgacctggttggtcttggcgataagcacgacagctatcccgcaaacctctccggcggccagaaacagcgcgtggcgattgcccgtgcactggccagcaatccaaaggtgctgctgtgcgatgaagccaccagcgcgctggacccggcaacaacccgttcgatcctcgaactgctgaaagacattaaccgtcgtctggggctgaccattctgttgatcacccatgaaatggacgtggttaaacgtatctgcgactgtgtggcggtcattagcaatggtcaactgatcgagcaggacaccgtgagcgaagtcttctcccatcctaagacgccgctcgcccaacagtttattcaatctaccctgcatctggatattccggatgactatcaggcgcgcctgaagcccacaccgctgcctgacagcgtgccgatgctgcgtatggagtttaccggccattccgtcgatgcgccgctgctgtcggaaaccgcccgccgctttaatgtgaataacaacattattagcgcgcagatggattacgccggcggagtgaagttcggcatcatgctgaccgaaatgcacggtacacaggaagatacccaggcggcgatcgcctggctgcaggaacatcatgtaaaagtagaggtactgggatatgtctgaaccaatgatctggctgctggttcgcggcgtgtgggaaacgctggctatgacgtttgtctccggcttctttggctttgtgcttggcttgccggtcggcgtactgctgtacgttacccgtccggggcagattgccgccaacgcccggctgtatcgtacgctatcggcgctggttaatatcttccgctcgattccattcattattctgctggtgtggatgattccgtttacccgcgtgatcgtcggtacctctatcggcctgcaggcagcgattgtgccattaacggttggcgccgcgccgtttatcgcgcgtatggtggaaaacgcgctgttggaaatcccgaccgggcttatcgaagcctcacgcgcgatgggcgcaacgccgatgcagatcgtacgtaaagtcctgctacctgaagcgctgccgggtctggtgaacgccgccaccatcacgctcatcaccctggtgggttattccgcgatgggcggtgcggtcggtgccggtggcctgggtcagattggctatcagtacggctacatcggctataacgcgacggtaatgaataccgtactggtattgctggttattctggtttatttaattcaattctctggcgatcgtatcgtccgggctgtgactcacaaataacgttattgacacacaacactaattcttacaggaaggaaataacatggcctttaatttcaaaacctttgcggcagttggcgcattaatcggttctctggctctggtgggttgcggtcaggatgaaaaagatcctaaccatattaaagtcggcgtgatcgtcggtgcggaacaacaggtcgctgaagtcgcgcagaaagtggcaaaagagaagtatggcctcgacgttgagctggtaaccttcaacgactacgtgttgccgaacgaagcgctgagcaaaggcgacatcgacgttaacgccttccagcacaaaccgtatctcgatcagcagattaaagaccgcggttataaactggtttccgtcggcaataccttcgtctatccgattgccggctactcgaagaaaatcaaatctctggacgaactgcagccgggctcacagattgccgtaccgaacgatccgaccaatctcggccgttccctgctgctgctgcagcaagtgggtctgattaaactgaaagagggcgtaggtctgctgccgacgtctctggacgtggttgagaacccgaaaaacctgaagattgttgagctggaagcaccgcagctgccgcgttctctggacgacgcgcagatcgctctggcggtcatcaacaccacctacgccagccagattggcctgacgccggcgaaagacggtatcttcgttgaagacaaaaactcgccgtacgtaaacctgatcgtcgcccgcgaagataataaagacgcggaaaatgttaagaaatttgttcaggcttaccaaagcgatgaagtttacgaagccgctaacaaaatctttaacggcggcgcagtgaaaggctggtaatctgctttcagcgtaatatcattcaggacgggctttatgcccgtcttgtcatttttgcaagcacctgattcaatagcgccctgttttataattcattgaggaaatactatgcgtgctttaccggtctgtttgttagcactcatgttaagcggttgttctatgctaagcagatccccgttgagcctgttaaaagcaccgcaaccacgccagtccagacggaaacggctaaaccaaaagtctcacgtcccgcgccggtcagaatctataccgatgccgccgcgctggttggaaaacccttccgcgatctgggtgaagtgagcggcgaatcatgccaggcttcaaaccaggactccccgccgaacatcccgaccgcccgtaaacgcatgcaaatcaacgcggccaaaatgaaggccaacgccgtgctgctgcacagctgcgaagtgaccagcggtacgccaggctgctaccgtcaggccgtttgcctgggttcagcgcttaacgtctcggcacaatgagtgcatttcagttcgcgcagataggcgtcatccgctcgccgtataaagagaagtttgccgttcctcgccagcctggtctggttgaacacggcggcggagaactgcatctgttagcgccctataaccaggctgacgccgtgcgtggactggaaaacttcagccatctgtgggtgctgttcgtctttcatcagaccatggctggcggctggcgcccgaccgtgcgccctcccgccttggcggcaacgcacgcatgggcgtcttcgcgacccgctcgacgtttcggcctaaccctattggcatgtcgctggttgaactgaaagacgttcgctgccagaaggatcaggtgatactggaacttggcagcctcgatctcgttgacggcacgccggtggttgatatcaaaccttatcttccctttgccgaagctctgcctgatgccagcgccagctatgcgcagcaggcaccgctggcaggcatgaatgtcagctttacgccggaaatagaagcactgttactgacgctggaaaaacgctacccgcatatcaaagcgtttatccgtgaagtactggcgcaggatccgcgcccggcttatcgcaaagaggaagaagcagggaaaacctacgccgtctggttgctcgatttcaacgtgcgctggcgggtaatcccctacggttttgaagtcttttctctcgaaccgcgctaattttattttcctctcttttggcatctttgccacactggtaaactaaaccactttttttgtttcaggctggccatccagcctgttccgatcgtccaaatggaaccgtaacaacatgcgtactagccaatatctgctctccactctgaaggagacacctgccgacgccgaagtcatcagccatcagctgatgcttcgcgccgggatgatccgcaagctggcctcagggttgtacacctggctgccgaccggcgtgcgcgttctgaaaaaagtcgagaacatcgtgcgtgaagagatgaacaacgccggtgctatcgaggtgttaatgccggtagttcagccttctgaactgtggcaggagagcggtcgctgggagcaatatggccctgagctgctgcgcattgccgatcgtggcgatcgcccgttcgttctcgggccgactcacgaagaggtcattactgacctgattcgcaatgagctgaactcgtacaaacagctgccgctgaacttttatcagattcagaccaagttccgcgatgaagttcgcccgcgtttcggcgtgatgcgctcccgtgagttcctgatgaaagatgcttactctttccatacctctcaggaatcgctgcaggaaacctacgacgcgatgtataccgcttatagcaaaatcttcagccgtatggggctggatttccgcgcggtacaggctgacaccggttcgatcggcggtagcgcttcccatgagttccaggtactggcgcagagcggcgaagatgacgtgatcttctctgacagctccgactacgcggcgaacattgagtttgccgaagctgtcgcgccgaaagagccgcgcgcagccgcgacgcaagaaatgacgctggtagacacgccgaacgcgaaaaccatcgccgagctggttgagcagttcaatctgccaatcgaaaaaaccgttaagaccctgctggtgaaagcggtagaagatagcagctacccgctggtcgccctgctggtacgcggcgatcacgaactcaacgaagtaaaagcggaaaaactgccgcaggtcgccagcccgctgaccttcgccagcgaagaagagatccgcgctatcgttaacgccggcccgggttctctcggtccggtaaacatgccgattccggtggttatcgaccgtaccgtcgcggccatgagcgattttgccgctggcgctaacatcgatggcaaacactattttggtattaactgggatcgcgatgtcgcgactccggaagttgctgatattcgtaacgtcgttgccggcgatccgagcccggatggtaaaggtactctgcttatcaagcgtggtatcgaagtcggccacattttccaactgggcaccaagtactcccaggcgatgaatgctgcggtacagggtgaagacggccgcaaccaggtcctgaccatgggctgctacggtattggggtgacccgcgtggtggccgccgctattgagcagaactttgacgatcgcggcattatctggccggacgctatcgcgccgttccaggtcgctattctgccgatgaacatgcacaagtcctatcgcgtgcaggagctggccgagaagctctacgccgagctgcgcgcacatggcatcgacgtgctgatggacgaccgtaaagagcgtccgggcgtgatgttcgccgatatggagctgatcggtatcccgcacactatcgtgctcggcgaccgtaatctcgacaacgatgatatcgaatacaaacatcgtcgcaacggcgagaagcagctaattaagaccggggatatcgtgaactacctggtgcagcaaattaaaggttaatttcccctttaaagctaaaaggcctcgcaatagcgaggccttttttattacatctgcacggattacttaccgcagtctttacccggaataaatttactgtctttatccgtcattagcgttttcatcatctcgccggtatccgggttcgcttcgagagtgaagtgcccttctaccaccagcaggaccggacgagtatcggtcccgcgcgctgcggcataatcacgttcaagctgggcattattggcaacggccaccgttttacctgtgacgcaatcggtaaaggttgccgcatccgccatatagaaatacatcccgcgcatcgccatcggcgtcgtcggcaggctggccttcactgactccagcgtatagttaagcgttgacttaatcgggttgccgtcgcgatcgagcatttccagcttgtcgcctttcgcccgatagtaggatttctcgcctttgctattggtcagcaccagtttatcggcggtacgcgcccaggtcccatatgaagcgaaagatgacggctcgcggctaacgccctgataacgttcgttcattacccaggtgccgtctttctcaagaaacaaagaggtctcaatcccttcgcaatccgcgcaaggcaaaataccgcgccagctttgctgcattggcttcagctcttccatcgccgtcggctgtaccgtctccacctcagcgcgatggttgcagccaaacagcgcaaagagcgaacaggccgctgcgagcgaaaatacaattttcttcactgtgaattccttataatccattccacccgtccgccacgcctctcaatggcgaacctttccacgcagcgctttgactgaggacttttgcgccttggaggcaagtcgtcgctcttttgacgcccgagtcggtcgcgtctcccggcggcttttttgcactgcggttaattcttttatcagcgtaaccagtcgcgagatcgccgcttcgcgattcatctcctggctgcgatattcctgagccttaatgataaccacaccgtcagcagaaattaagtggtgactggcggcgagtagacgctctttataaaactcaggcaggctcgatgctttaatatcaaaacgtaagtgaatcgccgtcgaggccttattcacgtgctgaccgcccgcccctgtgcgcggaccccggtaagcgagatctcctcatccgggatggaaacgctgcggctaatcatgatcatgccggctgctgccaggccgttaaatgaatttccagattattccgatcgtcggataaccagatgccgccgtcctgcagggttgcctgcagcgtcatggtgcgatcggcaaaagcgctcagctgcgccagttgtgcatcatcaagataccagatagtcagctttggatacgccgcaagcttattctgattttgctgccaccagatttcagccgcccggctattataggcaaacagcgccacctcctgcgcccgcgagcaggctttcttgaggcgtttctcgtccggcaaccccagctcaatccacagatcaacgcccaaatggtcgtttaactgccacagctccggttcatcatccgaggacaacccgcgggtaaactgcagacgctcgttggcatatttgatccacgccaacaggcgcagcatcatacgctcctgggtttctgagggatgttgcgccagcgtcaggttagcatccagaaactggttgcgatccaaatcggcaacattaaccactgctttataaatcgtcgctttcagcgccatgaataaactcctgaaaaaaatggcgtacattgtagcgaaactggcgacaaaaggctgtcggcaatcgcaggtactcctttcatcctgctgatattgcttagatgactatggtatagtcaccttgctaaacagagtttatcttcgtaggcttaaacttgcatcccacggttaagtcagaacgctgacaggagggcatgtggatcaatattgtgagttaatacgcaagcggtatgcggaaatagccagcggagacttagggtacatcccggatgcgctgggctgcgtgttgaaagtattaaatgaggttgcggcggatcaggccctttcggagtcagtcagggaaaaggccgcttatgcggcggcaaacttattggtgagcgattatgtcaatgaatgatacttatcaacccattaactgcgatgattatgacaacctcgagcttgcctgccagcatcacctggtgctggcgctgaccctgaaagatggtgaacagctgcaggccaaagcgaacgatcttatctcgcgtaaaaatgtcgagtatctggtggtagaacttgccggtaacgtccgcgagctacgcctggataaaatcgccagtttcagccacccggaaatcggcaccgtggtggtcagcgaatcctgaagcccatcgggcggcttagccgcccgttttccgccataccagctgtacccctgcgccttcctgtacttgcccctctctggtgacaaacagcccatcggccgccgcgatcaacgtttcgccataaaacaatagtggcgtagtatctcgacgccagggggcgaccgccatttcctgccagattttcttcagtttacgcccgcccggacgcccgacgatgtgcagattaccgctggcgcgaaaacgtatcgataccgactcatccgcctgcggcgcgcgtagcggcccaccgggctgcaacgccagttctccaagcgtttccggcagcattagcggtgtagtgggatccgcccatggcaactcccgctccgccaggcctggcagatgttttacccaatacaggcgttgctggtagcgcctgacggcaaagccggctaaccgcaggcaaggtgcggcgtcttcgcgcgccagcgccacttcctgccagatacgctccggcatttcgcgcgatggcatcggcgcctgttgggacgccaaccagcggcgcaacaacgccgcacgacgcggcgcgctcatcgcgcgaagcggttctatcgccagcgaaccacgctcatcaaccagcgcggcaagctccgccgacagcatttcatcgagcaactgttcctgttcgccacataagctggcgctgcgggcgacggcctcggcaaaatgcggccagcgctcgctcagcagcggcagcacccgcaggcgcagaaagttgcgatcgtaggcatcatcctgattactttcgtcttcaatccaccgcagttgatgagtcagcgcccattgatgcagggattcacggctctcattgagcagcggacgcagcaattttccgccggcgaactcgctactggcggccatcgccgataagccggtcgggccgctaccgcgcttgagcgccagcaggaaagtctcgcattggtcgtcaagatgctgtgccgtcaatagtacctcgccaggcaaaagcgcttcacggaaggcctgatagcgcgcctggcgagcatgcgcttcaatccccaatccctcatccgccagcgtcacgcgcaccacctgtagcggcacctgccactgctggcaaacctgttcgcaatgctcgacccaatggtctgcgttggcgctcaggccatggtgaatgtgaatcgcgcgcagttgaatcgctggctcgcgctggcgccagcgtaccagccggtgcagcaggacggttgagtccaggccgccgctgaaggccagcaggaactgacgatgtggtcgaagcgatgaggcaatatccggcgtcatgatcgtgcgtatgcagctaagaagagatagcccggcacgttacgcgccagggctggttctggcaagtattactgttggtaaatctccagcggcaggccgtcgggatcgttgaagaaggtgaaacgcttatcggtaaacggatcgatgcggatagcttcacaggcgacgccgtgcgcctgcaaatgcgcaactgcggcatcaatatcgtcgacgctaaacgccaggtggcgcagaccacaggcttccgggcggcttggacgtgcaggagggaaagggaacgaaaatagctcgataacgtactcgccgttcagcgccaggtcgcccttccacgaatcacgctcggcgcggtagaactcgctctgcagcgtaaacccgaggatgtcgcaatagaacgctttgctcttcgcgtagtctgtcgcgatgatggcaatatggtgaactcgttttaaacccagcatggttgttctcctcctgttgaagcccaacacgttactcgcgccgcccgccgccacgcaagcccctaattattttttaagactcgtacacggtagacgccgtcttcatcacgtttggccccatggatgtcggtttcaaaacctggatagtggcgaccgatcgaacagagcatcaataggaaatcgagcaccgcgcggctctcttcagtgatcatctctcccggcatcagcagcggcacgccaggcggatacggcaggatcatgtttgccgaaatacgccctaccaaattctccagttcgatggtttctacttcgcccttaatctgccgttgccaggcctgatgcggggtcattttcatctccggcagcacgtcaaacgcccgcagcattagttgcgagagctgatgctgacgaatcaggcggtggatcccctgcgccagatcctggatgcgcatattgcggtagaagtcaggatcctcagcgtaaagatccggcaacatgtttttcacccgcagattgagatcgtaggcgcgtttaaactcagtcagaccgcgcaacaggcccattgcccgggttttatcaattccgatactgaacaagaacaacagattgtacggcccggttttctccaccaccacgccgcgctcatcgaggaattttgccaccagcgcggccgggatcccctcttccgccatattgccctgctcgtccatacccggcgtgagaatggtgactttaaccgggtcaaggaacatatggtcggcatcggcatcctggaatccgtgccacatttctcccggcgaaaccggccagcactgcgcttcttcaacctcttctggttgccagatatcaaagaaccagccgtcggcctcttcacgcaggcgctgcacctccttacggaagtggagcgcgcgttcgatggagcgctgaatcaggcgttttccggagttaccgcgcagcatcgccgccgcggtttctatcgaggcgacgatcggatagcttggcgaggtagaggtatgcatcataaaggcttcattgaaggtatcttcatcgtagctgcctttaatatggatcagcgaagcctgcgacaacgccgccagcattttatgcgtcgactgggtttcgaagatcactttccccggtacgcggtcgccgctcataccgcttttcccctgataaatcgggtggaagtgggtgtagggcacccaggcggaatcgaagtggatcgacggcacgtcaagggtctgtttaatccaggtggtgttatacaacagcccgtcataggtggagttggtgatcaccgcatgcactggccactgcgcgccgcgagttgtctctactttgtgctggacgctgtcgcgggtaaattcccgtttcgggatgccgccgaggatccccaacgcgttacgggtcggttttaaccatagcggcacgatatcgctcatcatcagcagatgcgccagcgatttatggcagttacgatcgataagcaacgtgctgccagcgggcgccgaatacatgccgacaattttattcgaagtcgaggtaccgttggtcaccatatagctctgctcggcgccaaaggcgcgagcgatatactcttccgcttccagatgcgggccggtatggtccagcagcgaccccagttcagtgacggagatagaaacatcggccttcagcgtattaccgccgaagaaatcataaaacaggcagccgaccgggcttttctgataggcggttcccgccatgtgtccgggagtacaaaaggtatatttcccttcctgcacatagttaaataacgctttggtaaatggcggcgtgatgttgtccagatactcattggtatactggcgaatgcgggtagcgatatcttccgccagccccagagcatattcgaagaaccacagcgccatccgcagatcctggctgctgacgtccatcgtcgagtgcgtattgataaaagcatacagcggcaggtattcgttcaggcgattgatatcgctgcataaatcaacgctgtactcgtcccaatcgaagataacgccgcagattcgcggattgtgttcgataaactgcagcaggtcggcgctgttttgcggccagatagtctggaatccttgcttctgcaaagcggcttccagctctttgatcggttcgtctttatggtagacgccgtggggccccatgatggcgatgatattcacgctttcctcctggatttacctaaggtaagcataatatcaatcgcgccagtgcttagcactggcggatttatcttagtcctgaatcatagtaaaacgataattacagcgccttccacgcatccccccaggccaggcctgcgcccggttcgtagtaggttggcgccacgttgcaccatgccccttccggcaacggtttacactggaaaagcgcgccgtggttattgacgatgtcacccggtttccagctctggctggcgctccatgccggatagctgatagaaccgctatcgcctgccggctcatccttcgcttcatccgcaggcgcgttcgccttcacattgagggtataggttgctgtactggataagctaccatcgctcacggtcaggctgatcacatactgggcatctttatcactctgcggagcgctaaaattgatcaccgctttatctgtgccgcttaacgtctggccatcctgcgacatccagcgatagctcagtttgtcgccgttggcatcggtagaagcttccgcgctcagcgataccaggctaccggcttcaacggcaccgaccgggccggcaatacgcgccaccggcgcgacgttcgcctgtggcgcaggcgtaacgtcatccgtcttatcagatgcgccatcgctatccgtatcatcaacgacggtcacgttgaagtaatgctgcacgcatttactgtaatccccttctttaaacgcgctgtacggcgtctgatagctcaccagctgacaggcattggttttgccgtccgcggtgttcggatcccatccccaatcctgttcccagtagattggcagcgcgccggctccgccttcatcaaattgcttcatgttcttacagcccagcacttcatcatcggcaataggcactttgaggtagttggcgaactctttgtaataggcaatacggttaagcgattgggcgttttccgttgcgccgccgcactcgacgccgccgttgatgatctggatgctcacgccaaaccctggcaccaggccattgctcttatcacgatcgttgggctgccaggtaccgtcgataacgtgcagcatggaaggtttcggcggctgcggatagacaaagaagaacacggcgctggcgaggttcatccatgaatcggccaccaactgtggtttatccaacagcgggcgaacgtcgccatacatcgcctctgagaacgggccgtagttgtagttataggagagctgtttagcgccgcggccaaaatagctgaggaaatcgccatcggcatctttaccgcaaggccaggtttgcccctgccagacatccgggttacattcgccgttatagccgcccttttgaccttcggtccagccgacttcgcgcagatagaccagcgcctggcgccattccggaatatcgcgccagctttcgtggccgccggtttcctgagcaaagtgggcaaacatcgtcgccagcgatttacggcagatagcatcgctatcgcgaccatcggtataggtaccgcataccgccggaaatttaccgatcgccttgaggaagttgctgtaggtatattccggcgcgcgcatcgggaacagataatcccaatcctgttcgctgagcatgccctcaacgcgtttaacgttctccggattagccgccctgccgggttcaatctgctcgaccacagtattatcaagggtgcgaattgaggttttaaccgcttccatcagcggaaagtcggttagcgctttttcttttgccgccagttcgctggcggtcatggtggttgtttcagtggcgctgagcagcggcgccgcctgtgcggccccagacttaacatgatccctgcggccacggcgcttaaggcgacggttttatgaattgccataatattattctccttttccttatgaacggtctgcccaggcgttgtccccggcagtgaacgcagtgtcacgggaaaagacatcatcggctaatcacatcacctcattgacgtatcatcttacctcagtaaaaaaatgataaaaaaagggccggaaatccggcccttagagaattaagatgcgctgataaatcaggcgtagccgtagctcatcagacgctgatagcggcgattacgcagctcttcttcgctgagggtatccaggtcagccaggtcggccaacagctgtgctttcaggctcgccgccatcgcttccggattacggtgagcgccgcccagcggttccggaatgatggaatcgatcagcttcagctctttgaggcgcggcgcgatgatacccatcgcttccgcggccagcggcgctttatccgcgcttttccacagaatggacgcacagccttccggcgagataaccgaataggtgctgtactgcagcatattgaccttatcacctacgccaatcgccagtgcgccgccggagccgccttcgccgatgacggtacagataaccggcacgctcagacgcgacatttcacgcaggttgcgggcaatcgcttccgactggccgcgctcttccgcgccaacgcccggataggcgcctggggtgtcgatgaaggtaatgatcggcattttgaaacgctcagccatttccatcaggcgcagcgctttgcgatagccttccggcgccggcataccaaagttacgacggatcttctctttggtttcacggcctttctggtggccaatgatcatcaccgggcgaccatcaagacgcgcaataccgcccacgatagctttatcgtcagcataggcgcgatcgcctgccagctcgtcaaattcgtcgaaagccaggcggacataatccagggtatagggacgacgtggatggcgcgccagctgggctacctgccatgcgccaagatcggcgaagattttgcgcgtcagttctacgcttttttcgcgcagacgatgcacttcttcatcgatgttaatatccagtttctcatcctgacggcttacagcagtcagggaatcgattttcgcttccagctctgcgataggctgttcaaaatctaggaaattcagactcatagtattcctgtattagtcaaactccagttccacctgctccgagccgataaggccacgcagatcgttgagtaaacgatcgctcggagagacgcgccatgttgcgccaaaacgcaaccgcgcgcgcgcatccgccctctgataatagaggtgtactggaatggttcccgaacggtggggttccagagactgacggagtcggtttaaaagctggtcatcaatttgcctgtccgtcagcgagatagcaagcccgcgagcatatttttcccgggcttcgtcaatatccatgacttcacgggcggtcattttaaggcccccgctgaagtcatcaaagctgacctgtccgctgacgataagtatgcggtctttttccagcaactgctggtatttatccagcgcgtcggtgaataacatcacctccagacgcccggaacggtcatccagcgtacagatgccgatacgattgccgcgcttggtgaccattacccgcgcagcaataaccagacccgccgccgtggtcactttaccacgatcggttgggtgcatgtctttcagtctcacgccgccaacgtagcgttcgatctctttcaggtattggttaatcgggtggccggtcagatacagccccagcgtttccctttcaccatccagcaccacctgctccggccacggctggcagctggcgtaggattgctcgatttgttccggctcttccgccagcacgccgaacatatcggcctgaccgatggcttcggctttggcgtgctgatcggcggctttcagcgcatcgttcagcgagttcatcagcgccgcgcgatgcgggccgaggcggtcgaacgccccggacataatcagtttttccaacacccggcgattgagttttttaatatcggtacgggcgcacaggtcaaacagctcgcggaaatagccgccattgttacgcgcttcaatgatcgcttcaatcgggccttcgccgacgcctttaatggcgccgataccatacacgatttccccatcatcattgacgtggaaatgatacagaccggagttaatgtccggcggcaggattttcaaccccatgcgccagcattcatcgaccaggcccaccaccttctcggtgttgtccatatcggcggtcatcaccgccgccataaactcggccggatagtgcgccttcagccacagcgtctggtaggagaccagcgcataggcggcggagtgagatttgttaaatccataaccggcgaatttttccaccaggtcaaagattttcatcgccagttcgccatcaacgccgcgctttttcgccccttcttcgaaggtgccgcgctgcttggccatctcttccggctttttcttacccatcgcacgacgcagcatatccgcgccgccgagggtataaccagagagctcctgggctatctgcatgacctgttcctggtacaggatgatgccgtaagtcggctccagtacaggtttcagacattcgtgctgccactgcacgtccgggtaggaaatctcttcacggccgtgcttacggtcgataaagttatctaccatccccgactgcagtgggcccggacggaacagggccaccagtgcgatcatgtcttcgaagcagtcaggctgcagacgtttaatcagatctttcatgccgcgcgattcaagctggaagaccgcggtggtttccgagcgctgcagcatgtcgaagcttttcttgtcatccagcggaatcgcggcgatgtccagcggcccttcgccgttcttcgcccggcgcttgttgatcatctccagcgcccagttgatgatggtcagcgtacgcaggccgaggaagtcgaattttaccagcccggcgtattcgacgtcgttcttatcaaactgggtaaccgggtgcagcccctgctcatcacagtacagcggcgcgaaatcggtgattttggtcggagcgataaccacgccacccgcgtgcttaccggcgttacgcgtcacgccttcaagcttacgcgccatatcaatcagcgctttaacttcttcgtccgcttcgtagatttccggcagctgtggttccgcttcaaaggctttcgccagcgtcataccaggatctggcgggaccagcttggaaatgcggtcaacaaagccgtaagggtgacccagcacgcgccccacgtcacgaataaccgctttcgccgccatggtaccgaaggtgatgatctgcgataccgcgtcacgaccatacatatccgcaacgtgctcaattacctggtcgcgtttctccatgcagaagtcgacgtcgaagtcgggcatcgaaacacgttccgggttgaggaaacgttcgaacagcaggtcgaactccagcggatcaagatcggtgattttcagcgcgtaggccaccagcgatccagcgccggaacctcgccccggccctaccggcacgccgttatccttggaccactggataaattccataacgatcaggaagtagccagggaaccccatctggttgataacctgcagttccacatccagacgttggtcatattccgggcggcgcttagcgcgctcttcgggatccgggaacaggaattcgagacgctcttccaacccctctttcgacttcatcaccaggaagtcttcagtggtcatgtcgccggtcgggaactgcggtaggaagtattcgccaaggcgcacggtgacgttgcagcgtttggcgatctcaacggtattttccagcgcttccgggatgtcagcaaatagctcgcacatctcctcctcactgcgcatatattgctgcggcgagtagttgcgcggacgcttcggatcgtcgagggtgaagccatcgtgaatggcgacgcgaatttcatgagcgtcgaagtcaccggtttccaggaaacgcacatcgttggtcgccactaccggcaaaccgcgctcctccgccaattgaacggcggcatgaagatagctttcttcgtcctgacgaccggtacggatcagctccagatagtagcgatccgggaaatgttgttgatagaaggcgagacactgctctaccagcggcatgtttccgcggatcaggctgacgccaacgtcgcctttacgcccgccggacagcagaatcagcccttcctgatgctcaaccagccagtcgcgatcgatccatggtcccagcgcgccatagccgcgctgataggcacgagaaatgagaagcgtcaggttctgatagccggtattgttggccgctaaaaccgtcagctcggtgaattcatcgccaagcagatcgcactgaacgtggaagtcagcgccgacaattggtttaatcccggcgccatggcccgttccgtagaacttaaccagaccgcaaaggttggtgaaatcggtgatcgccagcgcaggcatgcccaaagcggccgccttcttcaccagcggcccggttttcgccagcccatcgatcatggaatagtcgctgtgcacccgcaggtgtacgaaacgtggttcagacatctttagatcccagtgacttagttggacgccaggcccagcgcgcgtttcaccgggccaaaactgcgccggtggtgctctgttgcgccgtgttcctgcagtttttgcagatgtacaacggtaggatagcctttgtgctgggcaaaaccgtattgcggaaatgcaatatccagcgtagccatttcggcgtcgcgagtgactttagccagaatagacgctgcgctgatttccgccacccggctatcgcctttcactaccgcctgcgacggcatcggtagcgatggacagcggttgccgtcgataagcacaaactcaggggtaatactcagaccagcgacggcgcgctgcatcgccagcatcgtggcgtgcaggatgttcagctcgtcgatttcatgcggctcggcgcgccccaggctccagcacagcgctttgtctttgatttcatcaaacagcgccaggcggcgcttttcgcttaattttttagagtcgttgaggcctacgatcggcttgcgcgggtccaggattaccgcggcagtgaccaccgcgccgaccagcggcccgcggccaacctcatcgacaccggcgaccagatgggtatgtggatagacgaactccatcattttgctaactccagtactgcgtccgccgcctgctcatccgcgttacagcggatctgctgatgcagcgcgcggaaagtatcatgcatatcgtggctggttttgccgtcggccagcagcggcttcaacgcggcggccagcgcctgcggctcgcattcatcctgcagcagctctttcaccagctcgcgcccggccagcagatttggcaaagagacataatcggttttcaccaaccgcttcgccagccaaaaggtaaacggcttcatgcggtagccaacgaccatcgggcatttcgccagcatgcactccagcgccgccgtccccgaggccaacagcgcggcatcactggcgatcatcgcatcgcgcgcctgaccatccagcatatgtaccgtcatatccggcgccgtctcagctttgattcgctcaaactgttcccgccgtttcgcattcaccagcggcaccacaacctgtaggtcaggataagcattacgcagaagctgcgcggttttcaggaagtcggcgctgagcatttcgacctccgcgccgcggctaccgggcagcaacgccaggcagtgaacgtcatgcgggatgcccagacggtcacgcgccgcgcccttatcaggatccagcggcatggcatccgccatggtgtggccgataaaacggcagggaacgttaaatctgtcgtaaaacgctttttcgaaaggcaggaatgccagaaccagatcggtggatctgccaattttgaaaacgcgtttttgtcgccatgcccaaacggacgggctgacgtaatgaatggttttgatgccctgctttttcaggttaccttcgagggtaatattgaaatcaggggcgtcgatgccaacgaagacatcgggacgcagctcgccgaagcggcgcgttaaatcggcgcgaatatgcaataagcggcgcagacgaccaagcacttcaacaatgcccatcacggccagctcttccatttcgtaccaggcttcgcatccttccgcctgcatcagcggccccgccacgccgacaaagcgcgcatcagggacgcgggctttgagggcacggatgagaccggcgccaagaatatcgccggaggtttctccggcgaccagggcaatcgtcaggggacgctgttcggccattaacgaatcaagccgcgagttgaacgggcaaagaaatcgacaaatggctgaacttcaggatgctgagccgccagttcggcgatttccggcttggcttcgtccagcgttttgccgctgcggtacagcagtttataggcgttacgaatcgcggtaatcgcttcacggctaaagccgcggcgtttcagaccttcgatgttgacgccaaacggcgtggcgtggttgccctgggcaatcacgaacggcggaacgtcctgtgcgacgccggagcagccgcctaccataacgtgcgcgccgatgatgcagaactgatgtactgcagtcatgccgccgatgatgacgaaatcatccagagatacgtgaccggccagcgtcgcgttgttggccagaatgcagcggtcgcccagcgtacaatcgtgcgccacgtgggcgttgatcatcagcaggttatcgctgcccaccttcgttaatccaccgccttgtactgtgccgcgatgaatggtgacgctttcgcgaatgcggttgcgatcgccaatttccactcgggtcggctcgccagcatatttcagatcctggttaacttcaccgatcgaagcgaactggtagatctcattgtcgcggccaattttagtgtggccattcacaacaacatgagacttcagtacggtgccctcgccaatttcgacgttggcacccacaatacaaaacggaccaatgtggacgttagcgccaatgacggcgccttcttctacaatggcggtaggatgaataaaggcggttttatcaatcacgtatcaggcctcccggctacgcgcacacatcatcgtcgcttcgcaaaccactttaccgtcaaccagcgcaacgcctttgaaacgggtcagaccgcggcgggttttctcaaaagtgacttccataatcatctggtcgcctggcactaccggacgtttgaaacgcgcttcatcgatacccgcgaagtagtacaactcgcccggctcaagttttccaacgcttttaaatgccagaatgccggtggcctgcgccatcgcttccagaatcagcacgccaggtaaaatcggcttaccagggaaatgcccctggaaaaacggctcgtttacggaaacattttttactgcgcgcagaaaacgaccttcttcaaaatccagcacgcggtctaccagcaggaacgggtaacggtgaggcagaagttccagaatctcttcaatgtgcagagtatgagtgtcagtagtcaaaatactcttcctgtctaaatatactaaaaggcaataataacacggcctgcggcaatcttattaacgaatgcaacaggccgggaatgtaacgtgaccgaatgatgaatttagtcttgttgattaaccttgcgctcaaccgctttcaggcgcttgctcatctcgtcaatattcatcaccagcgccgcagttttacgccacgccttgttcggctgcagcggaatacctgaggaatagacgccaggttcagagataggacgcataaccatccccatcccggttacggtgactttatcgcagatttccatatggccgttaatcacgctggcgccgccaatcatacagtaacgcccaattttcaggctgccggccataatcacgccgccagcgacggcggtattgtcgccaatcaccacgttatgcgcaatctggcactggttatcaatgataacaccattgccgatcacggtatcgtccagcgcgccgcgatcgatggtggtacaggcgccgatctccacacgatcgccaatgatgacgcgaccaagctgcgggatcttcacccagttaccgcgatcgttagcgtaaccgaaaccatccgcgccgatcaccgtactggactggatcaggcaattttcaccgatctcaatctcgtggtaaatggtaacgttggcccataaacgcgagccggcgccgattttgctatttttgccaacgaaacagccggcgccgataaccacgttatcgcccagcaccacgccggattcgataacggcattcgcgccgacggatacgttattacccagcttcgccgttgggtcgatcaccgcgcttgcggcgatgtcttgcgccggctgcggcgtggtatctaaaatttgagccatgcgcgcgtaggtcaggtagggattacgcactaccagcgcggcgctatgggcaaatggtaaatcgtccggcgtcatcacaacggcggaggcctggcaagcggccaggtgttcacggtatttaggatttaccatgaaagtaatttggcctgctttagcgctctgcatggacgcaacgccggtgatgacgatatcgccatcaccgtgtaattctgcatccaactgctgtgctaagtcagccagtcgaattgaaggcattacttatttaacctgtttcagtacatcagcggtgatgtctttaacatcgctgctgttgtatgccacggcattagagtcaacaaccagatcgatgctctgatctttcgctacgctctgaacggcagtctggatacgggtaaccagtttgccacgttcttcattggaacgacgtgcgcgatcctgctcaaaagcctgtgctttctgagagaaggtctgacgctgagacatcacgtctttttccagtttggtacgatctgcgcccggtttcatggactgcagacgctgcattttagactgcagatcgccttccatacgctgcagttcgctagcgcggcctttgaactcgttctccagcgtcttggaaacgccagttttctgagcaacctgctggaacagattattcatgttaaccagagcaattttatctgccgcctgagcggaagttaccattgctaaacccagacctgcagctaataaccactttttcacaattgactccttaccatcccatgagtacccagaggtaccgttatttgcgtggccaggcgatagcatccgctatcgcctacagtcagcgctatactgcacttacattccgttgttgccaacaattaccaggttttaccaatgttaaactggaactgctcggctttgtctccatcgtactttttaaacggttgggcgtaggagaataccaacggccccaacggcgacatccactgtaccgcgatacccgcagacatacgaatgttgttcggatcgctgtagtcaggcacgcctgcagcgcgggtcgcagcggtattttcccagtttgtatcccacacggtacccatatcccagaaaatggaagtacgtaccgagttcgcgtatttatcactgataaacggcgtcggggtaatcagctcaagactggcgaccgccatggcgttaccgccgaccgcatcgtctgacttacagtatgaaccgtcagtgttggaacattcttcgtagtcgttatcatctccggcgtaagcgccagatttatacaccgctttcggaccgatggtgttcgactggaagccacggacggtgcttgaaccaccggcgtagaagttctcgtagaacggcatctctttgctgccgataccgtcaccataacccagtcgggtacgacccagtacaacccactggtgatcgtcatcgatcggtacataggtcgcggtatccaacgtcgctttgtagtattcgttgtcagatcccggaatggtcactttaccgttaaggttgatacgcgaaccttctgtcgggaagtagccacggtccagcttgttataggtccagccgtagttaaacgtgaaatcgttagcggtaaagctatcggtgttctctgaacccacggattcaagataacgatccatcgccacctgcggctgcatattggacagggagttatgaacgtaacctaaacctgcacgcagcgagttgtattcgttgatcgggaagccgagggtgacgtctgtaccatagcttttgttggtatagtcagacagatccgcgtcattcgcatcaaagtcgttatagaagaggcgtccgccgaggctcacgccgtctacggtgaagtacgggttagtgaccgacagttcggcataggtctggtagtcgttcttggtcccgttgatgccaacggagtagccggtgcctaaccagttatcctgctgaacgcctgcctggaagctgacgccgctttcggtaccgtagccgataccgaagttcaggctaccggtattacgctctttcaccttgtaaacgacatcgacctgatccgggctacccggcacgcgctgggtatcggtatcgacggtttcgaagtaacctaaacggttaagacggtctttaccctgatcaaccaggtcgctgcccagccacgccccttccatctggcgcatttcgcggcgcagcacggaatctttggaggtgtcgttaccttcgaagcgaattttacgcacgtagtaacggttaccggcatcaacgttgatatgcagcttcacggttttatccgtgtcattgatttccggctgcgactggacgcgcggataggcgtagccatagcgaccgaggagtttcttaatgtcattctccattttggtcactttggtgccgttatacagctcgcccggctcaattttggtcagcgattcgatttccgccgaatggcccgccagatcgcccgttatctgcacgccggagagcttgtactgctcgccttcggtgatgttaacggtgatatagatgcctttcttgtccggcgtcaggctaacctgagtcgaatcgatgttgaaacgcgcgtagccgcgatccagatagtagctgcgcagggtttcaaggtcgcccgccagtttctgtttctggtatttgcgatcgccgacgacgttccaccacggcacttcatcgcgcagttggaagtgagagatcagttcgtcagtggtgaacgcgtggttaccgacaatgttaatctgctggattttcgccgagacgccttcctggaaaaccagtttcaggtcgacgcggttacgcggcagcggcgtcacgacagcttttacgctggcgctgtatttaccgacgctgtagtagaaatcttccagccctttttcgatatcggcaagcttggtgcgatcgagagattccccaacgcgaacgccggatgcctcaaggttttgcttgagcatgtcatccttcaccgacttgttgccggagaaggtaatgctcgcaatcgttgggcgctctttcacctgcaccagcagggtatcaccatcgcgcaggacgcggacgtcctcaaagttgccagtggcaaacagagcgcgaatggtgttactgatatcatcatcggtcaccgtatcgccaggacgcactggcatgctgaggagggccgcaccaacagcgacacgctgcaagccttcgaaatgaatgtccttcaccacgaacccttcagcaccgtatacagtcgcgctgctaaacagcagcgacgctatgagcaactttttcatcgccatcgttattatgcgttcttcctaacaaactctcttacaaccgagagaaatcattgaaaagtgcaagccccattaacagcaccagcagtattgagccaatgcgataactaaagtcttgaactcgctcggataccggcccgcccttcagcttttcaatcgccaaaaacagcagatgccccccgtcgaggacgggtaacgggaacaagttgattattccaaggttcacgcttatcagcgcaaggaacatcagatagtaaatcaacccaaattccgctgacattccagccccctgagcgatagaaatcggcccactgaggttgttcagtttgacatcaccggttatcaatttgcccagcatcctgaccgttaacgacatcagttgccaggttttatccgtggcttcggcgatggcggcaaacggcccgtactgacgcactgtcttgtattcatcaggcagcgggataacctttggtactacccctgcaaacccttcagccttgcctttcaccgacttcgtatccggagtcagggtcaacgacagcgacgtaccttgtctgtcgacctccagagccagcgccttgcccggattatcacgcaccagattaacaaacgtcatccactgcgttaacggttgaccatcgactttaacgatcctgtctcccgcttgcaaacctgctttctgcgcggccgactgagattgtacctcagccagcgcggtatcaatctgcgcgctacgcggcttgatgcctaacgaggccaccggatcttgtttatccggctcaaacgcccagtgacgcagatcgaggattttatcctgacgttggttcgtcccgaaaggggcgacggtaagtattgtttgttggtcgccaatcttcgcgactaacgccatacgaactgcatcccaatcaggcgtttcgatgccatctatcgctttaagttccattccttttgcaatttgtgcttgcgcagcgatggaattgggcgatatttcatcaataaccggacgaacgccggggacgccgatgataaacaccagccagtacgcaaagatggcaaaaatgaagtttgcaatagggcctgcggcaatgatggccgcacgctgaccgacggttttattattgaaagcgtaatgacgcatttccggcgccaccggctcgacgcgttcgtcgagcatcttcacatagccgccaagcgggatcagcgcgataacaaattcagtaccctgcttatctacgcggcgccacagcgctttaccaaaaccaatggaaaaacgttcaacgcgcacgccgcagcgacgagccacccagaaatggccgaactcgtgcacggtgatcagtacgccaagcgcaataataaaagcggccaaattccagagaacgctcagcataaaaccttccgtcaaatcgtcctgaagactaacaacagcagacaagcgaacaccggcaccgcagccgtcaggctatcaatgcgatctaaaataccgccatgtccagggatcagatgcccactatccttgatgccggcttcacgcttaaacatactttccgtcaaatctcccagcactgaagccagcgccgctaccaccgagcaaatcagcaacacggttggggtgacatccagatgggcccacacgccataagcccaggagataacggctgccgtcagcaggccaccgaaaaatccctgccaggttttacccggagaaaccttcggcgccagcttatgcttaccgaacattttaccgaacatgtaggcgccggaatccgcccccacaccagaatcatgacgtacagcagccacaccgcgccgctatagtggttatcggcataatgccaggcccgcagcgccagcatgccccagaaaaacgggacaatagtcagcacgccgaagatcagacgcagcgcttttgaatggcgccacaacgccgccgaggccggataagagagcaccagcaccaaggcgacaatccaccagccaaacgaagcccataacgatccctcaaccatcggttgatgagcgtcatagtggtattcaggcaacataaagagcattagcgccagcagcaggccgcaaagcaccgccagccacacgcgctgcgtcgttgaggtgaaaccgcttaattgcccccactcccacgcggcgagcatacaaacgaccagggtgacgatagcaaaacccgcgggcggcaatagaaaaagcgccgcaattacgacgggaattaaaacgaaagcggaaatcaggcgatacttcagcaaaagtgacccccatcaggcatgactgccacccggctcttctgtgccgccaaaacgacgctctcgactaacgaatgcatggagtgcaccttcaaagtcctgttcagcaaaatcgggccaaagaacatccgtaaagtaaagttcggcataggcaatttgccaaatcaaaaagttacttattcggtgctctcccccggtcctaataactaaatcaacgggagccagttcatgcatgcacacctgctggctcaacatgtcttccgtgatctcttcaggttttagcaacccgttttgtacctgttcggctagctgacgcgcgccctggacgatatcccagcgaccgccgtaattagcggcgatattcagcgttagtccggtattgtttgccgttagcgcttccgccttacggatacgctcctgcagccgggcattaaagcgcgtcgtctcgccgataatccgcaggcggacattgtgacgatgcaggctttttacttcgctatccagggcccagacaaacagttccatcagcgcgctcacttcctgcgccggacggttccagttttcactactgaatgcgtaaagcgttaatgcttcaataccattattcgccgcgaaggagaccgcgcgacgaacagatttcgctccagctttatggccaaaggcgcgaattttaccttgttgtttcgcccaacgaccgttgccgtccatgataatggcgacatggcgacaaccatgcgcaggcgacattttgctgacagtttgattagcagacaacataacgcgttttaagtccataataaggattagctaagccacaatacacacgccgccgggcagcgttgaatacgcatttttatccggcgccgaagctacagccaatcgcagagaacaaccaaaagctttacgcaaaaaagccgtgtcttgccacggccaccgtaacctttcacaacaaaatgcaacgatcgggtggcgcagactatatcaccgaagcccagcgcccacaaatatcacaacgcgttacaggggctcccctgcgccatgtgttatcgcagttgtcgctgtgcggcgacacgcgcttcggcatcaattgcaaccacttcatcaatactttgcggttcattgagcgccatacaatccagcaccgcctggttaaccgccgcgatatcggtaaagcggatttcactattcagaaacgccgccactgagacttcattagcggcatttaacgccgtcgtcgccgcctggccgacatcgaaagcgtccatcgccagcttcaggcacggatagcgatcgtaatccggcgccgagaagctcaggttactcaactgacagaaatccaacggtttaacgccggaattcagacgctgcggccagcccatggtatgggcgatcggcgtacgcatatccggctcgcccaactgtgccagcacgctgccgtcctgatagcgaaccatggagtgaatcaccgattgcggatgaataatgacttccatctgctgagcagaagcattaaacagccagcgggcttcaatgtactccagccctttattcatcatcgtggcggaatcgacggaaattttgcgtcccattgaccagttcggatggcggcaagcctgatccggcgtcattgccgccagctcagaaatcgccgtttcccggaaaggaccaccggaaccggtcagcagaatcgacgagacgccgttctgcgtcaggtcagcgtatcccagatggttttgaattgtttccggcatactctgaaaaatcgcgttatgttcgctatcaacaggcaacaggcgagcgccatactgctgaaccgcgtccataaacaggcggccgcaggtcaccagagactctttgttcgccagcaggaccgttttgccggcgcgaatggccgccagcgtcggcgccagaccggccgcgccaacgatggccgccatcacctgatcgacctcatccagcgccgcgacatcagccgccgcctgcttgccgctcagcacttccgtgcggcagccctgctcacgcagcagcgtacgcaaacgctcagcgctttgcgcatcatccatcaccgcgaatcggggagaaaattccagacattgttcaaccatacggtcgacatttttccccgcgaccagcgcggcgacggaaaagctttcgggattatgacgcaccacgtccagcgtgctgcagccgattgaaccggtcgaaccgagaacggttaattgcttcatgagacgtccagaagaattgtgacaggattaaaaagcaaaacgccgccagcaagccctttacacatcaatacttggggctaaaacggcggcgaatgaccttcggtatagaacggaaggctacaaggccagctattttaacgcaatcccaaatattgagcgtacggtcttctgtacggcgtttcagactttacgcagcccagaataagccgggcccgcgtaacgcgcagaaaatcagaactgcatcagttccgcttctttctctgccagcgccgcatcaactttcttaatggcggcgtcagtcattttctgcacgtcgtcctgagagcggcgatcgtcatcttcgctgatctctttctctttgagcagagctttaactttgtcgttcgcgtcacggcgaacgttacgcacggcgacacgcgcctgttcagcttcgccacgcacgatcttggtcagatctttacgacgttcttctgtcagcggcggcagcggaacgcggatatcgctacccgcagagcttgggttcagacccaggtcagacgccataatcgctttttcaacggccgggctcatagagcggtcgaaaacgttgattttcagcgtacgggaatcttctaccgtaacgcttgccagctggcgcagcggagtcggcgtgccgtagtattctacaatgatgccatccagcaggcttggagaagcacgacccgtgcgaattttgctgatttggtttttgaatgcttcaacgcatttttccatgcgtacttcagcatcttttctgatatcgctaatcacgttacgaatccttgaaaacttgtctcagacagaccacacggtcgctcaccgcaaaagtgagctaagtatagtccggattaattcaattaaccgggcaacttccccgctaaagtaaagcggaatattacccggaattagcgccgacgggaattattccgtaatcaatgtgccttctttttcgcccatgaccacgcgacgcagcgcacctggcttgttcatgttaaatacgcgaatcggcagtttgtggtcgcgcgccagggtgaaggcggcaagatccatcactttcagctctttatccagcacttcgctgtaggtcagctgatcgtacatggtggcggaaggatctttcgccgggtcagcggtaaacacgccgtcaaccttggtcgctttcagtaccacgtcggcttcgatttcaataccgcgcaggcaggctgcggagtcggtggtaaagaatgggttgccggtacctgcggagaggatcaccacgcgattgttacgcagcaggctaatcgcctccgcccagctgtagttgtcacacacgccgttcagcgggattgcggacatcaggcgagcgttcacataggcgcgatggagcgcatcacgcattgccaggccgttcatgaccgttgccagcatgcccatgtggtcgcccacaacgcggttcatacccgctttcgccagaccagcaccacggaacaggttaccgccaccaatcactacgccaacctgaatacccagttcaaccagttctttgatttcctgagccatacggtcaagtatgcttgcatcaataccgaagccttctgaaccctgcagagcttcgccacttaacttcagcagaatacgtttgtagacgggttttgcattggtagccatgtttctttcctgagactgtcaacgattgagatgagttaattctgacgacattgtatgtcatcgttcagcgcagtcactataagcgattggctgattttacaagagaggcgcaaaaagaagccgccctcaggcggctccttttttaaaaattaagactgcttggacatcgcagcaacttctgctgcaaagtcagtctcaactttctcgatgccttcgcccacttcaaagcggatgaagccagtaacgtcggcgttgtgctctttcagcagctgaccaacagatttgctcggttccataacgaaaggctgaccagtcagagaaacttcgccggtgaatttcttcatacggccttcaaccattttctctgcgatttctttcggcttaccggactgcatcgcgatgtccagctgaacctggtactctttttctactacttcagcagaaacgtcttccggcttaacgaattccggcttgcttgcagcaacgtgcattgccagctgcttaaccagctcttcgtcagcgcctttagcggcaaccagaacgccgatgcgagcaccgtgctggtagctgcccagaacgtcgccttccaggatagcgatacgacggatgttgatgttctcgccgattttagcaaccagggcaacacgttcttcttcgaactgcgctttcagaacttcaacgtcggagattttaccagcaacagcagcgtccagtactttgtcagcaaatgcctggaaaccaccatctttagcaacgaagtcagtctggcagttaacttccagaatgtaaccgtagttgccgtcgattttggttttgatcacgccgtcagcagcaacgttgcctgcttttttcgccgctttgatcgcgccggatttacgcatgttttcgattgccagctcgatgtcgccattcgcttcagtcagtgcttttttgcaatccatcatgcctgcgccagtacgttcgcgcagctcttttaccagggaagcggtaatttcagccattctaaaatcctcgggagatgtggaaactgcccggcctgcggccaaacagcataaattgaaaaaaggggcctaaaattggcccctattcatacacggtactaataagggcttaaaccttattattcagcttctacgaagctttcttccgcctgagaagccaggtcctgagagcgaccttcacgaacggtagctgcaacagcgcccaggtacaggctaactgcgcggattgcatcgtcgttacccgggataacgaagtctacgccgtccggatcagagttggtatcaacgatagcaaataccgggatacccaggttgtttgcttctttgatagcgatgtgctcgtggtcagcgtcgataacgaacagtgcgtccggcaggccgcccatgtctttgataccgcccaggctgttttccagcttgtccagctcacgagtgcgcatcagcgcttctttcttggtcagcttctcgaaagtaccgtcctgggactgagtttccaggtctttcagacgtttgatggactgacgaacggttttccagttagtcagcataccgcccagccagcgatggttcacgaagaactggtcgcagctgttagcagcttcttttaccgcttcgcttgcagcgcgcttagtaccaacgaacaggatcttgcctttacgggcagaaattttgttcagctcagccagagcttcgttgaacatcggtacagttttctcaaggttgatgatgtgaactttgttacgcgcgccgaagatgaaaggcttcattttcgggttccagtaacgggtctggtgaccgaagtgaacaccagccttgagcatgtcgcgcatggaaacagttgccatgtttaaaacctctatagattaaattggggttatgcctccacgtatcccatattaccgaccccaaagggcacccggaatatgtgccgatacgtgtgtgttatttacacaatatgagtatgtcgcttacgcccatccttgtgtatctgagatggaacggaagtccggcgcgctttataccataaaacctactcagacaccaactcttgttgacgtcgcgtgctgttaatgattctcaatttggcaccagcgtacccggactgttaccattgacaggacttaatctattattgtcgaaaaaatcgacactgctggacatattccatggctatctctatcaagacatctgaagacatcgaaaaaatgcgcgttgccggccgcctggccgccgaagtgctggaaatgatcgaaccctacgtcaaaccgggcgtcagcaccggcgaactggatcgcatctgcaacgactacattgttaatgaacagaaagcggtctccgcctgcctcggctatcacggcttcccgaaatcggtctgtatctctattaatgaagtggtgtgccacggcatcccggatgacggaaaactgctgaaagacggcgacatcgtcaatatcgacgtgaccgtgattaaagatgaattccacggcgatacctcaaaaatgttcatcgtcggcaaaccgactatcctcggcgagcgcctgtgccgcatcacccaggaaagcctctatctggcgctgaagatggtcaaaccggggattaacctgcgcgcgatcggcgcggcgatccagaaatttgtcgaagcggaaggtttctccgtggtgcgcgagtactgcgggcacggtatcggccgcggcttccacgaggaaccgcaggtactgcactatgattcaccggaaaccgacgtggtgctcaagccgggtatgaccttcactatcgaaccgatggtcaacgccggtaagaaagagatccgcagcatgaaggacggttggacggtgaaaaccaaagaccgtagcttgtctgcgcagtacgagcatactattgtggtaaccgataacggctgcgaaattctgacgctacgcaaggatgacaccatcccggcgataatctcgcacgatgcataatgaaaagccggcgcccgccggcttttttattagatagttttttcttatggtgacgcgatgagcaactctttacctgacacagcctcctctcttctgcccatcccgccggaacatcccgtgagctggccgcagggcgatctgaactgtgccgcaatcaaggcgcacatcgataccttccagcactggctcggagaggcgtttgataacggcatcgccgcagagcaactcatcgcggcgcgcaccgagtttatcgaccagttgctgcagcggctgtgggtcgactacggttttggcgcacagagcgatatggcgctggtggccgttggcggctatggccgcggcgagctgcacccactctccgacgtcgacctgttgattctgagccgcaaaaagctgccggacgaacaggcgcaaaaggtcggcgaactgctgacgctactgtgggacgtcaagctggaggtgggccacagcgtgcgcaccctcgaagagtgtttgctggaaggactttcggatctcaccgtcgccaccaacttaattgaatcccgcctgctgatcggcgacgtcgcgctgttccttgaactgcaaaaacatatctttagtgacggcttctggccgtcggaaaaattcttcgccgccaaggttgaagagcagaatgttcgccaccagcgctaccacggcaccagttacaacctggagcccgatgtcaaaagcagccccggcggcctgcgcgatatacataccctgcagtgggtggcacgccgccacttcggcgccacctcgcttgatgaaatggtcggcttcggcttcctcaccgaagccgaacgcaacgagcttaacgagtgcctgcaccagctctggcgcatccgttttgctttgcaccttgaagttaatcgctacgataaccgcctgcttttcgatcgtcagctgaatgtcgcccaccgcctcggctatgaaggcgaaggtaatcagccgatcgaacacatgatgaaagatttcttccgcgttacccgccgggtgagcgaactcaataacatgctactgcagctgtttgacgaggcgatcctcgcgctaaccgagaacgaaaagccgcggcctattgatgatgatttccaactgcgcggcaccctgatagacctgcgtgacgacaccctgtttatgcgcgagccgcaggcgattctgcggatgttctttattatggtgcgtaacagcagtatcaccggtatttactccacgaccttgcgtcatctgcgccacgcgcgccgccacctgacgcagccgctgtgctatatcccggaagcgcgaaccctcttcctcagtatgctgcgccatcagggcgcggtgagtcgtggtctgctgccgatgcatcgccacagcgtgctgtgggcctatatgccgcagtggtcgcatattgtcggtcagatgcaattcgacctgtttcacgcctataccgtcgacgaacacaccatacgcgtcttgttaaagctggaaagcttcgcgaaagaagagacccgcagccgccatccgctgtgcgtcgagctgtggccgcgtctggctcaccctgaacttatcctgatcgccgccctgtttcacgacatcgccaaaggccgcggcggcgaccattcgattcttggcgccgaagacgtgctgaaattcgccgagctccacgggctcaactcgcgggaaacgcaactggtcgcctggctggtacgccagcatctattgatgtcggtgaccgcccagcgccgcgatattcaggacccggaggtcattaagcagtttgccgaagaagtgcagaccgaaaaccgcctgcgttatctggtatgcctgaccgtcgccgatatctgcgccaccaacgaaacgctgtggaatagctggaagcaaagcctgctgcgtgaactctatttcgccaccgaaaaacagctgcgccgcggtatgcaaagcacgccggatatgcgtgaacgggtacgccaccatcagctgcaagcgctggcgttattgcgtatggacaatatcaatgaagaggcgctgcaccagatctggaaccgctgccgggcgaactactttgtgcggcatacgccgaatcagctcgcctggcacgcccgcaacctgctgaagcacgatctcagtaaaccgatgatcctgctgagttcacgggccacccgcggcggcaccgagatcttcatctggagcccggatcgcccttacctgttcgccgccgtctgcggcgaactggatcggcgcaacctcagcgttcacgatgcgcagatcttcaccacccgcgacggcatggcgatggatacctttatcgtccttgaacccgacggcagcccgctttccgccgatcgccacgaagcgattcgccacggtctggagcagacgataactcagcgcagttgggagccgccggccccgcgtcgccaggcggcgaaactacgtcacttttctgtcgctactgaggtgaattttctgccaacccataccgaccggaaatcatttcttgagctcattgcgctcgatcagccagggctgctcgcccgcgtcggccaggtgtttgccgacctcggaatatcgcttcacggagcccgaattacgacaattggtgagcgagtagaagatttatttataatcgccaccgccgaccggcgtgcccttaataatgagctgcaacaagaagtgcaacaacggttgacagaggccctcaatccaaacgataaagggtaacgtattttttattagtgaatggaaagaaacaatgcagcagttacagaacgttattgagtccgcctttgagcgtcgcgccgacatcacgccggcaaatgtggataccgtcacccgcgaagcggttaaccaggttattgccctgttggattccggcgcgctgcgcgtcgctgagaaacttgacggtcagtgggtgacgcatcaatggctgaagaaagcggtactgctctctttccgtattaacgataaccaggttatcgatggtgcggaaagccgctacttcgataaagttccgatgaaattcgccgactacgacgaagcgcgcttccagaaagaaggcttccgcgtagtgccgccggcagccgtccgccagggcgcgttcatcgcgcgcaataccgtgctgatgccgtcctacgtcaacatcggcgcttacgttgatgaaggcaccatggttgatacctgggccaccgtcggctcttgcgcgcagatcggtaaaaacgttcacctgtccggcggcgttggcatcggcggcgttctcgaaccgctgcaggctaacccgaccatcatcgaagataactgcttcatcggcgcgcgttctgaaatcgttgaaggcgttatcgttgaagaaggcgcggtgatctccatgggcgtttacatcggccagagcaccaaaatctacgatcgcgaaaccggtgaagtccattacggccgcgtgccggcgggctcggttgtcgtttccggcaatctgccgtcgaaagatggcaaatacagcctgtactgtgcggtgatcgtgaaaaaggttgatgcgaagacccgcggtaaggtcggcatcaacgaactgctgcgtaccatcgactaagcagaacaaaaagcgggagatatcccgctttttttatatctgacgctggcgaagatgaattttttcgttaattattcaatggttatgatgatatcaaaggtaccgttatgtacgataatctgaaaagtcttggcattaccaatcctgatgaaatcgatcgctatagcctgcgccaggaagctaacaacgacatcctgaagatctatttccagaaagataaaggcgaattcttcgctaaaagcgtgaagtttaaatacccacgccagcgtaaaaccgtggtcgccgacggcgtcggtcagggctacaaagaagtgcaggagataagcccgaacctgcgttatgtcatcgacgagctggatcagctctgccagcgcgatcgtactgaaatcgacctcaagcgtaagatccttgacgatttacgccatctggaaagcgtcgtcaccaataagatcagcgaaattgaagccgatctggaaaaactgacgcgcaaataaacccgcctgatacgggccagctactggcccactttcccttcccagccttttttctcactcgcagctcatcttcgtcatcagcaaccctcaattatccctcactaacatcatttcacatcacaacactatccatatgaattacttaattttttatttcatttatgttcaatttccatctaaaaggaggtcaagctatgacacaggaaattgaacaaaaatgttacaccctacaatccgccacctggctggataaggcgggtttcgagaaaggacgaaaacacgatcgtcaggctttgggctttattctgcccgccaatacggtgctgaaaattcggcaaaccgatctcagcaacggcatctcaaccctgcgcctgctgtgtgatgataccgctgtggaaaaatccagcgctctgactaccagctggacaaccatcagcaccaccgtcgattccgtcccctttatcgatacgttgtttaccgacagcccctgcgagttctccgtggtttaccagcaacccgcaacgacgaaaccgctaccccgctggcaagctggcgagtctgaagaagcgtttttcctgaactgggagaataataaatcatcgttcgcgctggttgatttgggagttatcaatctgctgctgccctatgccgatcgtgataatgcgataaaggcgggtttagcggcgttacaccgtttttataaccaccttttcaccagctataacgattgggccggactaagcgaaaatcccgattctctatggaatcaggacgttgccaatcgctactttttgcgggcggataaacatggcgtcggttcggcttattacaattccaactggtgcgcgcagaccgccgcaaccattggcgaaggctggctggataacgtcgccacgcagtgggttatcctgcacgaaattggccacggctatcagggtaaatttatgcaggatcccacgctgtccgtcagcgaagtgtggaacaatatttacgcctccttctatcaacagctcacgctgagtcaggataatcctctgtataccgatggctggttatacaactatgggcaactggccgcgcaggaagcacagctgataaactatattaccgacaagacgccggtcaccagttggggtttgcgttctcgcctgcaattcctgatgctgatgttattcaaagcaggtatcgcatccttccgcacctttaaccagaactatcgccagcttgccaatagcgagggtttccagccgtcggatcatcagcttgccgatatgctggcaaccgccatagctacctctgcgggatatgatgtaacgccgtttatcgagctctgcggcttaacgctgaagcacgccacccgtgaaaatatcgtctcactggcgaccaaaccgctctatccactgtatcgttttctgccgcaaagcgaatgggatagcgcacgtcagctactggggctggactccttcttctggctggtggataaccgcgagctggcaatattaggcaaaacggggacgttaaccctgacgctgaatatcgatcgcccggagcaaatttacggtcagacgctgactatcaaagataattgcggtaaccattattcactggtgattaatggtgacgccctgaccctgaaagatatgccaatcggcgtgtatcaaatcgaactccctaaaggtcgttcgcaaaaatatcgcccggatatcagctatatcaccataaaagaaggtgccaatgcggttaccgtcaactacgttcagcaaaacgataccagcgaacgtaacgtgacgatctcctttttaggttatagcgatgcgccttttgcccgtctggacgttgattacgaaaatcagcagcttattctcaatgtgaccagcgccacgccgcacagctactaccccggaacattgtatgccgcagtcagtgtgctctccgccaacggtgaaaaagtgtttgagcgcaaaatgaccggcaccaactgcgcgacgggtaaagtgattattccattcagccctcactatcacttatatattactcacatggagccgggacggctgacaacctcaccgggatatttaacgctggtcgcgcgtgagaaataccagctcatacgcattgatgataatggtctgtataactttattctcggcaatagcccggcggatgatttacaggcaatttttgagcataacgctcagtcgatccgtaaccagccctcgctgttagcgcaggaagagtgcatctgtaaaaacgatctttggctgatgctctcccatattgcagacccccaacgcagcagcttactgaaagcctacggcgatgttctgccccagaataatgacgatccgggcgagctgacgggcaaaagcgtgacgctcaatctccgcggccagggcaataacgagttttgccagatcgttatcgataataaacagcgcgcaatgacggtcgcgacacgggccggcacgccgcactcgtattacaccacgcatacctatgccagcattacggttaccgccgaggacgatacggtcgtttatcaacgcagctacgtcggcgctaccaacaatctggtaaacagcgaaacgattaccctcgccgaagggatgatcattgagattttccatgatgaaccataccgctccagcgccactaatggtacgacccaaaacgccgtcacgctgaaacagcataaccgctggcgcgtggtgaaaacgggcctcgaagtctatgcgctcacgcctgttgagccggatgaggaagccactgatacagaagaggaaactcaggagaccaccgcactgtatggcgatagcttcagctggcaactgcttggcgatgatgatgtttgctttgccgggatggaaatggatattggcagcggcgcgttgacctttagcgccaatgcggtggtaccgaataagcactttacgaccacttacgccacggtcaatgtctacaatacgcgaggttcggtggtgtatcgccagtcgatcaaaggatcatcgcagcttggcgactatgttgataccgctatcctggatgagggctacaccattgaagtcttccatgccgaagcgggcaatcgttccgttattattaatccactcaatggcaacagctggcaacaacccaataccgtcacctggcaagtgacccccgcgggctgcagcgcctgtaatctgtcatttctactcccgccagtggcgggagtgtttttaacgttgctcatccagctgcaatgcaatgtaaagcagcagacggtcgtcaaaacttcccaggtccaatccggttagttccgaaatccgattgagtcgatactccagggtattacgatgaataaacagcgcctttgacgtggccagcggctgcacgttatgacgaaaccatgcctgtagagtacggcgtagcaggccgttgttatccatcgccttcagccgcgtcagcgggcgcgccagctcattggcctgccagccgccgcgcaggctatccagcagcaccggcagcatcagatcctgataaaaataactgcggctctccggcatccgctgcttccctaccatcatcgtcgtgcgcgcggtccgataagagcgtgcgatactgccggggccggtaaagaaattacctaacgcaacgcggaactgcagctggccgttttctttcatacgggcaatcagttgctcaacgcgcttgcagtggtcatcggcgtcccagcggccaaaagcatttaacgctggtttcaataccaccatctcggtcaacgagacaatcgccaccaggttgttgcgatccggcgtggtcagcgccgtctgcagctgctgtagttccgccatcgcgctatcaacgccgagctgaccgctatcgacctcaatcatcgccaccacccgcggttgattgaggtcgatacccagtcgctgcgcccactcgttgagcgccggggtattctcttccgcctgaatcaggttcatgaccaattcttcacgcaggcggctgtcctgcgccagcagatgcatcagccgcgactgttcgagcatcatctccgcagtcatacacaccagctcaccatacttgcgcagcgattcgggctcgccggttaatccgattacgccgacgatttccccttcgagacgtagcggcaggttaattccctggcgcacgccgtggagatggcgagctaccgcatcatcgatatcaaccacccgtccctgcgacagcacaagcagcgcgccttcgtgcaattcaccaatacgttcacgatcgccgctgccgataatgcgcccgcgggcatccattacgttaatattggtgtcaatgatgcgcatcgtacgcgccacgatatcctgcgccattttggtatcaagatgccagccagccataatccctcccctgagcagggcatcagcataaaagagtggcaaagagtacgcactgtgcatatgcacaaagcacgacagagaagtatggagttgtggcgggaatcacagaaccagcgaaaagaataaaaaagcccccttccggcacgggaagggggcttatacgcgctgataggttattgcatcagcagatagatagaagtatcaccacgctgaatattcagcgccagtacagacggtttcgcgtcgaagattttgcgcaggtcggcgatgtttttcaccggctgctggttagcgccgacaataatgtcgcctttcttcagaccaatctgcgcagccggcgtgcccgctttcacgttgctcaccaccacgcctttgtcctggcccttgttgctcatttccgcgccttcaatgccgttaaagatgctgctggagtccacctggttctggttgctctgctgcaattcaacggtaacgttgaccggcttgccgtcgcgcagcagtcccagtgcgactttgctgccgataggcatcgtgccgacctgcgcgcgcagcgccgcgaagctgctaatcggcttgccattcagggtagtaattacgtcgccggctttaatacccgctttcgccgccgcagagcccggcatcacctggcttacaaacgcgccgcgctgggcatcgactttcattgccttcgccagctcggagttcagctcggtacccatgatccccagttcgccgcgtttcacctggccaaacttgaccatctgctcggtcaggtttttcaccatgttgctcggaatagcaaagccgataccgatattgccgccatccggagcaaggatcgcagtgttgataccgatcagttcaccgttgagattcaccagcgcgccgccggagttaccgcggttaatagccgcatcggtctggataaagttttcatagttttccacattcaggccgctgcggcccaatgcggagacgatcccggaagtcacggtttcaccgaggccgaacgggttaccgatcgccacggtgtagtcgccgacgcgcagcgcgtcagagtcggcaagcttaatcgccgtcaggtttttcggatcctggatttgaatcaatgcgatgtcggagcgcggatctttaccgacgactttcgcgtcgaatttacggccatcgctcaactgaactttaatcgtggtggcattatcgaccacgtggttgttagtcaccacgtagcctttggccgcatcaataataaccccggagccgagcgccataaatttctgctgctgagcgttatcgccaggggcgccctggccgccgccctgacagaatggagagctctggaatggcgaaccatcctggcagaacggcgaattgtcaccgaagaactgctggaagttacgcggcatccgcggcgtgttaacagtcgtgctgccttcaacgttgatgctcaccacagacggcatcactttttccagcatcggcgccaggctcggcatctgctgcgcagtggtcgccgaggaagccgtttcagccgcgctcgcagagagcggggacaacgccagacctaaactcagagccagagcactcattgctaacgtggtttttttcataggtttcaatctcaatttcaaatttcggataacgaaaaagttgctgtgtacgcactctcagagtcattttatagcgcgaagttccagagttaagtttcggtaaaagtaaaaatttattgtccgtctttacaaaactcagacttattccaccgccatcagacggcgatattcatcccacgcatacaaatccgtcattccgctgatatagtcctgaatcaatcgacaacggtaataatactccagcacgggatattcttcggtatcgcgcgaaagcttatttaccgcctccacataagccaaccgatgtcgggtcgagagtttctgaaacagcctcgaagcaataggcaaactgcgtacacgctcttgttccaccaattggctgaactcctccagcgataatttcagtagcggctcgtagatatccaaaagtccgctgataacccggtagccctgtaattccagctgttcaacatcaggatgactaaacacctgttttatggcgacgtttttataaagttcaagtagctgactacaatcgctgtcgtcctctaaaagcgcatgattaaagtcgccgctaaaaatagctggtaagttttcgataaatcgatgcgccgcataaggcaccagtttattcaacgtattaacccgtaaatacataaagaactgatcttcagtgctgcggctcagtgaattagcgtgcgatttctcccacgcgttttctacgacttgcgcgaacaacgatcctttttcatgagggccccacgcgtcatacagatgctgatacaattgctcagcgctgaatatccttttttctaccgcatcttcgaggtcagcaacacaatatgagatatcatcggcagcctccataatccacgttaatggaaagcgattgtaaggcgccagatccaattctttacgcagccgcgcgatatactcttcttcggctaaataataaccaggctttttcattaaatagctatggctggcaggcgtctctccccgccaccacgccggcctcgtatatttcagaatgcagccgacctgggtccaggtcaggttcatacgcatcagcgtgtgtaccagacggatgccctgagcgttgccttcaaagcagcacaaatcctgacgcaccttacgccgcagttcgttgagcagtccttcgccgtcgtgcagacgcagcgcgtcaacctggcagcgatcctggcttaatggctggctggcggcatctttcggcgccagccgtttgctgaaccaatcgttaattgccgcttcgccaaaatggccaaatggcggattgccgatatcgtgcatcaggcaggccatctccacgacgctttcaaacgggccgctcagttcatccagaccgtagcgttccagcagcttttgctccttcagtcggcttaacacctctttggcaatgtagcgcccgacctgctggacttcgagcgaatgggtgagccgggtgcggaccgccgcgttacgctcaagtggaaagacctgggttttttgctgcaggcgccggatggccggtgaattgataatgcgcccgcgatcgctttcaaacacccgcaggatctcgcgttccgtctctacaccctgcggcgaacggtagcgccgacgccagtgaatcttgttgcgaaaatcaatatttgccatagcctctcccgcgcgagcaatacgcttccccttaagcgcatgatagactatgcagctaatcctgacacatcgcgagtaaatctatgaaaattggcattattggcgccatggaagaagaagttacccttctgcgcgacaaaatcgagaaccgccagactatctctatcggtggtagcgaaatctataccggccaacttcacggtaccgaggttgctctgctgaaatccggcatcggtaaagtggcagccgccatgggcgccaccctgttgctggagcgctgcaagccggatgtgattatcaataccggttccgcgggcgggttagcgccgacgctgaaagtcggcgacatcgtggtctctgacgaagcgcgctaccacgatgccgacgtcaccgcgtttggctacgaatacggccaactgccgggctgtccggcgggtttcaaagcggatgacaaactgattgccgccgcggaaacctgcatcaaggcgctgaatctcaatgccgttcgtgggctgatcgtcagcggcgacgcattcatcaacggctcggtagggctggcgaaaatccgccataacttcccgcaggccgttgccgtagaaatggaagcgaccgccatcgcccacgtctgccataacttcggcattccttttgtggtcgtgcgggctatctctgacgtcgctgaccagcagtcgcatctcagcttcgacgagttcctcgccgtcgccgccaaacagtccaccctgatggtggaaaatctggtgcagaacctggcgcgtggctaagtcgctacagaaggcgttaaccgccctgctgttactcgccccggcgtggcttttcgccgcgccgcgggtggtgacgctctccccggccaataccgaattggcctttgctgccggcattacgccggtcggcgtcagcagttattccgattatcctcccgccgcggctaaaatcgaacaagtcgccagttggcagggaatgaaccttgaacgtatcgtcgctctgaagcccgatctggtgctggcgtggcgcggcggcaatgccgaacgccaggtgaatcagctcagctcgctgggaatcaaggttatctgggttgaaaccggttcgattgagcaaatcatccatgctctgcagatgcttgcgccgtggagcccgcagccggaaacagctcgtcaggctgcccagaagatgcaagacgattaccttgcgctaaaagctcgctatgccaccgtgccgaaaaagcgcgtatttttgcagtttggcgccaacccgctgttcaccagcaacagcgcctcgatccagaatcaagtattgagcctgtgcggtggagaaaatatttttgccgccagccgcgttccctggccgcaggttagccgcgaacaggtgctgtcacggcatccgcaggcgatcgtcatcaccggcgatcctgataaaattcccgccgtggaccgctattggcaaaatcagctcacaatttcgctcatcgccttacatagcgactggtttgaacgcgcgggcccacgtattatccttgccgcaaaacaactctgtactgcgcttgagcaggtaaaataaccgcctggcagcaggcttttagcgggaactgacgatgcttgtctattggctggatattattggcacagccgtatttgcgatctccggcgtattgctggcgggaaaattacgcatggaccctttcggcgtgctggtattaggcgtggttaccgccgtgggcggcgggacaatccgcgatatggcgctggccaacggcccggtattctgggtaaaggatcccaccgatctggtcgtggcgatggtcaccagtatgttaacgattctgctggtccgccagccgcggcgcatgccgaaatgggtactgccggtactggatgccgtcggcctcgcggtgtttgtcggcatcggggtgaataaagcctttattgcccataccggcccgctggtagctatctgcatgggcgtggtcaccggcgtcggcggcgggattatccgcgacgtgctggcgcgagaagttccgatgattctgcgcaccgaaatctatgccaccgcctgtattgtcggtggtatcgtgcacgcgacggcacactatacctttcaactgtcgctagaaaactcggcgatgttaggcatggtggtgacgctggggatacgcctggcggcgattcgctggcatctgaagctgccgacctttgcgttggatgataacggacggtaataaaagcaaaacggtaacctcatggttaccgtttttcgtgttcgttgctctctgtggcagagggctggtatgactatctttaaacgctgaacgaggagccgcagccgcaggtgcttttcgcgttcgggttagtcacgatgaaacgtgacccttccagaccttcggtataatcaacggagccgccaaccagatactgcaggctcattgggtcaaccaccaggccgacgccctgtttctcgatggtcatatcgccttcgttgatctgatcgtcaaaggtgaagccatactggaaaccgctgcaaccgccgccggtgatgtacacgcgcagtttcaggttcggattatcttcatccgcaatcagatgttttactttattcgctgcggcttcggtaaattccagcggcaacgctacgtcatcactcattttttgctcccattgatacttccggccgattaaagaataaccggaccttttgagccattatctaataccctggtaaatcgttcaagtattctcccggggtacctgctgcgctttcgccgcctcttcggccttctgtttcgccagggtacgctgcagaatagtcgaatacaaaggtttaccaccgaggaactgcgccaatagtgttgccccaaggcaggtaataatcattggcaaaatgagctgatagttatcggtcatctccagcaccagcacaatcccggtgagcggcgcgcgaaccgaagccgccagcaacgcccccatcccggcgattgcgaaggtaccggcatccagatgatatgacggaaataacgggatagccgccatgccgaacgccgttcccagcagcgtgccgagcgccagcatcggagcgaaaatcccccccggcgcgccagaagagaagcacagcaacgtggtgatgacgcgcgcaataaaaatgaacagcagcagcccaacagagaagttaccggctgcagcgatggggatcagattaaagccgccgcccaccgccgttgactgcatcaggcccagcagaccgcaaagcccgccgataagcccgccaatcaacacccattttttgacattgccgccatggaggcgctggaacatatcctgcgttcgcagcaccagggtattaaacaatggcccgaaacagccgaagatcatgcccaacaccaggtacaaccacagggtattcaccggcgcattgctcagcttgccgacttcgataatcgcccttcgccgttaaaaatgcgaaacacgatgctcgacatgatcacgccggtaaacacggctttaatcgaaatcaggttgtagcggaactgcgggcgcatctcttcgatgataaacagaatgcccgccagcggcgcgttgaaggccgcggagaggcctgatgccgcaccggtggccaacagcgtgtgccgcgcttccgggctgcgcagacgaaacacatccaccaccatgcgcccgatattgccgccaagctgcaccatcggcccttcgcgccccagcaccatcccggcgcccagcgtccccataccgccgatgaattttaccggcagcacgcgccaccagcgaaccggacgcaactcttccagcgcgccttcgatttcagggatcccggaaccgcctgcctccggcgcaaagcggcgcaccagaaaatagccaaccatcgccagcaacgccgacaggataaaggccaacggccagacgaggtaccaatggtccgccacctgcaccagggcgccaattcgctggttctgcacccagttcacgctcttttcaaacgccacgcccaccagcccggccaacgtgccgaccaccgctgccatcaacaataccgccagcggcgttttgtcgcgttgaattaaccggcggaccgcatcgctacggcgcacgcgaacaaactgatgtgcttcaaaagagggagtttctgctttcatgccattatcatttattggtaatacaaatgagaagagaggcattctagccgcctccgcgccgcgcgtcgccaaaaaattgtttcgtctgcttaatgtttcaattgggcaaaactttcataaccttcatggaataacttagaatagcccgataactttattcacgaaccaggatcctggccatgagcaaatctgaaaatctgtataacgccgcccgcgaacttatccccggcggcgtcaactcgccggtccgcgcctttactggcgtcggcggcaccccgctgtttattgaacgtgcggatggcgcctacctgtacgatgtcgatggtaaagcttatatcgattatgtcggttcctggggcccaatggtgctgggccacaaccatccggccattcgtaatgcggtgattgaagcggcagagcgcgggttaagcttcggcgcgccaaccgaaatggaagtcaaaatggcggaactggttactgaactggtaccgaccatggatatggtgcgcatggtgaactccggcactgaagccaccatgagcgccattcgcctggcgcgcggcttcaccggccgtgacaaaatcatcaaatttgaaggatgctaccacggtcacgccgactgcctgctggtgaaagccggctccggcgcgctgactctcggccagccgaactcaccgggcgtaccggccgattttgcgaagcataccctgacctgcacctataacgatcttgcctcggttcgcgcggcgtttgaacagtatccgcaggatatcgcctgtatcatcgtcgaaccggtggccggtaacatgaactgcattccgccgcaaccggagttcctgccgggcctgcgcacgctgtgcgaagagttcggcgcgctgctgattattgatgaagtgatgaccggcttccgcgtcgcgctggcgggcgcccagtcttattacggcgtggagccggatctgacctgtctgggtaaaatcatcggcggcggtatgccggtgggcgctttcggcggtcgccgcgaggtcatggacgcgttggcgccgaccggtccggtgtaccaggccggtacgctgtcaggcaaccctatcgccatggccgcaggcttcgcctgcttaagcgaagtggcgcagccgggcgtgcatgaaaccctgaccgagctgaccaaccagctggcggatggcctgcttaacgcggcgcgcgaaaccgggatcccgctggtggtcaataacgtcggcggcatgttcggtatcttctttaccgatgccgaaaccgtcacctgctatcaggacgtggtgaagtgcgatgttgaacgtttcaagcgtttcttccacctgatgctggaagaaggcgtttacctcgccccgtcggcgtttgaagctggctttatgtccgtcgcccatagcgaagaggatatcaacaacactatcgatgccgcgcgtcgggtgtttgccaaactgtaaggtacttgaatgcctggtggcgcagggattttcccggaggcggcgcattgcgccttatccgggctaccaaattgcacagcgctgtagccccggtaagcactagcgccaccggggatgttgtggccatcgggatcgttagcggctctgctttcttaataaatagataaaatacggcgcgccgataaacgtcgataacagccctgccgggatttggtaggggaacatgatcatccgcccacaccagtcggcgaacaccagcagcatcccgccaatcagtccggaaatgatcatatgcggcatcgtccggcgaaagcccatcatcctcgcaatatgcggcgccattaaaccaacgaaacttaacggcccaatggttagcgtcgccgtcgccgtcaggctcgccgccagcagcagtaacccgatacgcgatggcgtcagcgccatccctaccgcccgcgccgcctcaccgccgagcggcaggatggtcagccagcggcggcagagcggcgtcagcgccaatagcgccagcattaccacgccgctacgtagcaccatctccggcgtcgcgctataggtcgaaccggacatccacgtcaggatctgcgccattcgcggatcgccgctggcctgcagcatcatcaatagcatggtgaaggcggtactcagcgccatccccgccagcaacatccggtgcggcgagaatccgccgcgcccggcggcgatcaggatgaccagcagcgtcgccgctgcgccaagactgccggctggcagcagccagacaaaggcgttacccggcacgaagaacagcatcaacaccacgccgaacgccgcgccagagcttatccccagcacttccgggctggccatcgggttaccggtcaggcgttgaatgatacaacccgcgacggctagcatcaccccggcgaacagcgccgagaacacccgcggccagcgccagggcattaattgctccagcagatcgccgctggcccattgccacccctgcgcatcacggccaaaggtcagcgcggcggttaccgccaacaacatcagcgccaatccgcccagcgcgaaccactgcacgttgcggcgctcaatcagcgctttatcgccgccattcatcaccggcgcgctgatgctacgcagccgcggtagcagccacaataataaaggcgcgccaatcagcgcggtgactgacccggtagacacttctcgccatatccggctgagccagagaataatttggtcggaaagccacaggatcagcgcgccaagcagcgccgccagcaccagccgcgatagcaggcggcgggcgccgagcattttcgccaacaacggcgcgaacagaccgataaagccgataatgccgaccgcgttgaccagcagcgcgcttattactatcgccagagtcaagacgccaaggcgcgccagagagagcgccagcccaagattccgcgccacgccatcatccagccccatcaacgttaacgggcgtagcaacagcagcgtcaacatcgcgccaccaagcagctgcggccacaggcgctgtgccacgctccagtcggtctgcgttagcgtaccggtactccacaggaacatgctttgcaactggtcgtgatggaaaattaccatcagctgattgaccgcgccgcaatagagactcaccaccagaccggccagaatcagcgtcaccggcgacagacgtttgccccacgagacgccgaacaccaacgcgccgaccaggcaagcgccagccagcgcggcaaactgcgacgccagcacgccggggatcgcccatagcgtcgtcaccgtcattccgagctgcgcgccggtggcgacgccgagcgtggtcggctccgccagcgggttacgcagcacctgctggaacagtacgccgacgagtcccagcccggcgccgaccagcagcgatacagccagcctcggcagcaggctgtaatggaacagcatctgagcgatattatcgctatccggctgccacagcgcctgacgccactgcgcgtaaggtaaagcaacctgaaggttgacgatgctcagcgcgaaagcggcaaccagcagtacggccagcaggatcatagctaacggcgagaaacgcgcgttcataccgccctcccctgcgcatcggccagtacgcgggcgaaatgcatcgccgacagcgtcgcgccatagaaccacaccgccggaagacgctggaaacgccccgcgcgcacgaaaggcatcgcctgccacagcggggtcgccatcagttgggccatctcccgatcgttgccatgatcgaaacagataacatcggcctctttaaattccgccagccgatcgatgcctacggtgatactgccccagaatgccgcttcgccgtgccaggcgtttttgatgccaaagcgatcgagcacttcctggaacaggcagttctcgccgaagaccagcacatggcgagcatcaagtagcgaaatcatcagcagcggacgatcgtcacggtcgacaaatcgtggacgcaggctttccatcaacgcgtcgaactccgccagatggcgcttcgcctgctgttgcttacccagcaggtcggccatttcctgcagcgaacgctgggccatcgccagcggccgtttgccgtcgctgaaggtgaaaccgcgaccgggcgcgatacgcgccagcttttccggcgacgggccatagcctgctgaccagacgataaacgacggtttcatctgtgtcagcaactcaagattgggttcagtgcgcaggccgacatctatcaccgaggcgggcaacgccggttcattcacccacaggttatagttgggaatgtcggccacgccgtagggcgtaacgccgagcgccagcagcagttcggccggcagccactccagcgcgacgacgcgctgcggatcaacgtttgccgcctgcgcgtcgcgcatctgccacagcagcggcgacagcgccattgccgtcaacaggcgtcgacgtgagaagaagttcgaattttccatcaatagacaaaacttaccggcgctgcgcccgccgggtgcggcaggatccccatcgggatgccgtagatttgctccagcgtttcgctgcgcatcagctccgcgggcgtcccctgggcgatcatttcgccgccgcgcagcgcgaccagataatcgcaataacgggcggccatattaatatcgtgcaggaccgcgatcaccgtcaggccacgctgctggctgagacgatgcaccagcgccagcacatcgacctgatgggcgatatccagcgccgacgtcggttcatcgagcagcaaacagcggctatcctgcgccaccagcatggcgatccacgcgcgctggcgttcgccgccggaaagactgtccaccagccgatgcgccaacggtttcagccccaccagcgcaatggcctcttctactttttcgcgatccgccgcgccgaagcgccccagcgcgccatgccacggatagcggccaatcgccaccagttcacgcaccgtcatcccttccgccgccggcagttgctgcggcagataggccactttgcgggcaaacgccttactgctccagctgtccagcggctggccgtcaagcagcacatcgccctcggaaggcggctgatggcggccaagcattttcagtaacgtggatttgccggaaccgttatggcctatcaggccagtgacttttcctgccgggaaggtcaacgaaaggggatgaagcagcgtgcggccaggcacgcgaaaggtcacgcgatttaacgcaaacgtcgtttcagagtgcggagtctgttcctgcatagcaacaacctgatattgggcgcggcgaaccgcgcccgtgagtagttagaagcggaaggttgcggtagcaacaacctgacgttccgctccccagtagcatgcgtactcgctatagcaactggagacatattcgcggtcaaacaggttgttgacgttgacgccgaccgaagaccccggcagaccaaagcgcgccagatcgtatttcaccgtcgcatccatcagcgcataaccggccacattgaaggaatcatttttcttcccttctacattcttgtaataactcaccgtcgaaccgatataacgcgcgcccgcgccaatggtcagcccgctgagcgcggtttcgtggaaggtgtaatccgcccacagcgaggccatattacgcggcacttccgccggacgcttgccttcgaagacggtgtcgtgagtgtattcggcatcggtatagctgtaagccgcagtcaggttgatattggcattgaccgccgctttcgcctccagctcaaagccgcgggagcggatttcgccggtttgcacgctgaaaaaaccgctggtgtcgttgggatccgctgtaaggtttttatctttggtcagctgatagaccgccgcggtcaccaccaccggcatatctttcggcacgtatttcacgccggcttcatactgcttgccgcgtgagggatcgaatggtttaccgttgaggcctgagccagataccggttcgaacgattcgctatagctgaagtacggggagatgccgttatcgaacagatagttgatcccgccgcgccagctgaactgctggtcgtgattctccgccatgttgctggtggaacgggtgaaggtagacgtagtcgcgtaatcgtaacggcctcctaaggtcatcacccacttatcccactccatctgatcctgcgcgtacaggcccgtctgctccatacggttaagcacagcatatttggagttcagcacaatatttggattgccgtactgcggattactcatgctaatggcatcggccgtaccgtagtccgcgtcaacgtcattacgcatccgcgagtagtccacgccggtcagcagcgtgtggttcaccgcgccggtggcgaaatcagactgcagttgcgtatcaacggtaaaggtattcaggtgctcatcggaacgaacatagttgcgctggattttaccaggctcctgataaccatagccatagaccgaacgatacagcgtatgcacatcggcatagcgcaggttttgacgcacggtaaaggtgtcatcgaactggtgggagaagctatagccaaccatctgctgacggcgcgccatcttgttatcggactcgccttcgttgaaatcggtcggcagcttgtgcgccttaccgttggcatcgtaatacggcaccacggtaccttcgcgcggcagccagccgtagtaacccgcatccgggtcgttctggaagttgctcaggaaggtgaaatcggttttatcatccggacgccagctgaaggatggagcgacggcgtaacgggtcgatttcgccatctgctgctgcgcatcctggctgcggcctaatccggtcaggcggtatgaccacacgccgtcatcatcaatggcgtcgctgaagtcgaaaccggtttgccacaggttatcggtgcccatcttaaactggacttctttcagcggctcggtggtcggacgcttgctgaccatgctgacgataccgcccgggttgctgttgccgtacagcaccgaggttggcccgcgcatcacttccacgcgttccaggaaatacggatccatggagacttcagagtagttgttaccctgcagcttcatgccatccagatactggttggtgttcaccgtgctggaggtggtgaatccacgaatggtgaccacatcataggtagtcgagctaccgcgagtggagaaaacgctcggcgtgtaagagagcgcttctttgaccgttgtcggctgcttcatgtccatctcttcgcgggtgaccacggagatagactgcggcgttttttcaatgggagtatcggttttggtcgccgtggcggaacgcttcgccgcgatagtcggggccggcccccaggcgctttcctggctggcgggcgccgcggtaacgacgagggtttcttctttcggttgttccgcagcctgtgcataaacagacatgccgctaaccgccgtggctactacgactgcgattttacgcagcgagtgatttggctgagcagttttaagacgcgccattggtatatctctgatgaaagtgaatgataacgtaaacgagaattattattatgacgggtgacataataggcgaaacgcggaatctaaggcaagcgctatgccgggcaggaagcgccaagggattaataaataaccagacggttattaaggagttatcacggtgttacgcagatgcccgcaataaaaaagccccctaataccttcgtattaaggggctgttcagacgttcggcttaaacggttttagttaccgccaaacatatctttaatccaaccggcaacgccatcgctcttctcctgcttcgcaggttgctgctgttgctgctgcggttggttagcaggctgctgctgcccggactggttgaacgggttattggcttcctgttgctgttgctgctgttgctgcagggcttcgccctgacggcacagcgcatccggcgaggtggtccacaccggcaacgtacgcataccgccgccgcactggaagtaaccattgctgtccacgcccatatccaccacgtcttccggcggcgtcagcgccagcggcgtcggggtctggttagcaaggtagcgctgataaatcgacatcgcgccgctggccccgtacagcttggtcggctggttgttatcgcggccaacccaggtaatcgtcacctggctgccatcgataccggcaaaccaggtatccacgttgttgttggtggtcccggttttacccgccagatgcaggccaggatatttggcgccaagctgacggccggtaccgcgctgcaccacctgctgcatggtccacagggtcatataggccgcctgcgccggaacggcgcgttccgcctgcgggtagctctggtacaacaccgtaccatcttcagcaatcacggaacgcagcgccgacagcgtcgcgcggttaccgccgctggcgatggtctggaatgcctgcgcgacttcaattggcgtcaggttgagggcgccgaggatcatcgccggtaccgcattcaactggtctttcggcacgcccagcttctgccaggtatcggtgatcgccggcagacccagcgacatcccgaggttaaccgtcggcacgttcatcgaacgggtcagggcatccaccagcatcacctgaccgctaaagcgacgatcgtcgttctgcggcgaccaggtctggccgttcgacaagcgaatcgtcaccggcgcatcggcaatccacgtattcaggcgatactggttcggctggctcagcgcggtcagataggtggccggttttgccaacgaaccaatcgaacgacgcgcctgcatcgcgcggttgtagccggcaaactgcggctccgcgccgccgaccatcgcccggacttcaccggtaaagcgatcgaccaccaccattgcagtttccagatccggcagcttacgctgtttcttcagtaccgggatcccttcaatggccgctttttccgccgcctcctgggcaacagggtcaaaggtggtgaagatcttcacgccggagagatctttcactttatcgcccagtttcgcctgcagctcctggcgcaccatctgcatgaacgccggctgcggagaaatcaccccgccgcgcggctgcacgcccagcggacgcgcgctcagcatatcgtacagctcctggtcgataatattctgctgctgcagcagacgcagcaccaggttacgccgctccagcgccagtttcgggttacgccacgggttatagattgacgccccttttaccatcccgaccagcagcgcctgctgatcgaggctcagctcttctaccgggcggccaaagtagtacaggctcgccagcgggaagccgcggatttcgttgtcgccgctctgaccgaggtacacttcattcatgtacagctcaaggatacgatccttgctgtaacgggcgtcaacaatcagcgccatataggcttcgttggccttacgccagtaggagcgctcgctggacaggaacaggttcttcaccaactgctgggtcagggtactcgccccctgcaccgtacgccccgccgtcaggttcgccagcaccgcgcgacccattgagtacaagctgatgccgtcatgctcgtagaagtgacggtcttcggtcgccagcagcgtatccaccagcagatccgggaaaccgctgcgcttcacgaacaggcgctgctcgccgttcgccgactgcagcatggtgatcaggcgcgggtcgagacggaagaaaccgaactgacggttgttatccatattctcgatggtatccagatgatcgccatcaaaggtcaggcgcgcgcgcacctgcccctctttgctatccgggaaatcaaacggacggcggatcatctcaatgctgttagcctgtacggtgtattcgccagggcgcgtcattgcgctgacctgacggtactgggtcgcattaagcaggcgcaccatctcgtttttgctgatctgcatatccggctcaaggttgaccatccggccatacactgccgccggcagttcccagactttaccgtcaatgcggctgcgaattttctggtcgaggtagacgccataggcggcaataattaccgcaaagacaatccccagcttgaccagcagccacagccagctgcgcttacgacgaggcttattgcctttgccctttcctttcttcggcattggtcgttcatcctcataatcgtcatcgtaatcatcgtcgtagtcctcttcccggacccggcgacgggtgactttttgttttgccgggcgtgaaggtctccctttacgtccgataggctcgcggtcatctcccgccatgctttttctccgcaactttcaggcgtaacggcctgattctcaatacttccccctgcaggaggaagaagatatctctcaatttcacacccgccgcgctgccgcggccaatgtctttcacatcatcttcgaagaataattcattaaacaaatcatataattatctgtttaagctgaagaatatctccggacatagcacgaattgtccaggccacagagaatagcactaatccgcgccattcttaaccagcattttacaaccgcaaaacgcgataaacggtaaattatgatgttttttaataacataaatattgcaccgtatgacgcagtccgctgattttcagaaccacgctgccggggtattgcgcatcacgagtattttttcgtccgccgggtcggcgcggtattcgccgggtcatccggccagacatgtttcggatagcgccctttcatctctttttgcacttcgcgataggccccttgccagaaggcgcttaaatcgcgggtaatttgtaatggtcgctgcgccggcgaaagtaactccagcaccagaggaacccgcccttcggcaatgcgcggcgtcgtcgcctcgccaaacatctcctgcatccgaaccgccagcgccggcgggttatcttcatgatagcgaatggcgatacggctgccggtcggcaccgtgtaatgggtcggcagctcgctatccagcttctggcgtaacgtccacggcagccagttttgcagcgcctgccgcaggtctaccgcgttgagcgtccgaagcgaatgcacgccggtcatctgcggcaacagccacccctccagcgcagccaacagcgatgcgtcgtcaacggcaggccatccctcttccggcagccactgcgcggcgcagtgcagacgcagtcgcaattgctccgcctccggcgtccagttcaacaccctgagccctttatcgcgaatgccgttgagcatcgcctgatgcagctccgcttccgacggcttcgccagcggctggttttttatcaccagctggccaatgcagctacgccgccaggcttttagcgtcccctgcgcttcatcccactccacggtatcggaacgctgtatcagctcaggacactgcgccaccagttggtcaatatccagcggcagcgccagcaaaattcgcgcatcgggcgccgaactgccctgcagcagcagcggcgcaattaaccattcgtgacgcccgagcgcgtcatcggcatccagcatcgcgcccatgccgttagccagctgatagcgcccttcctggccgcgtcggcgggcgatacggtcggcaaaggctggagccagcaacgccgccatccgctcagcatcaggctgaccgccgcggctggccagccgcttcaataactgctgcgcccgctgctgccagttgccctgctggcgcgcaaacgcggcacctaaatcgctgcttccgccgcgcggcggctcctcaagaatagccgccagtttcgccgccgtcgccgcgtcatccgcggaagcggccgctgtcagcatggccgccagacgcgggtcattacccagcgtcgccattttgcgcccatgagccgaaagacgttcgccctccagcgccgataacgccgtcaacagacgccgcgccgccgccaggtttatcgccggtggtagatccagccagcgaagctcggccggatcgcggcagccccactgcaacaaatccagcagtagacccgacagatcgctttgcagaatttccggatcgctctgcgccgccgcgcgctccgcctgctctttcgccagcagatgcaggcagatccccggctccagacgcccggcgcgaccggcgcgctgggtcattgacgcctggcttatccgctgggtaattagccgggtcaggccagtgcgcggatcgaagcgcgctacccgctcctgagcgctgtcgaccaccaggcgaatgccttcgatcgtcaaactggtttcagcgatattggtcgccagcaccactttgcgcatcccggcaggcgccgggagaatcgctttgcgctgttcgctcagcggcaacgcgccgtacaacgggcataacagcacatcgctggctacacgctcgctcaattgttcctgtacgcgctgaatttcgccaacgccgggcaggaataacagcatcgagccctgctcctcacgcagcagatccgcggcggcgatcgctaccgcttcggcaaaacgctgatgggtcgccagcggcgcaaagcggcgttcaaccgggaacgcgcgcccttcggaaaccaccaccggcgcctccggcaacaggcgctgcagacgatcgttatccaacgtcgccgacatgattagcaacttgagatcgtcacgcagcccctgctggacgtccagcaacaacgccagcgccagatcggcctgcaggctacgttcatgaaattcatcaaggatcaccagccccacgccggaaagttccggatcgtgctgcaaagtgcgggttaagatcccttcagtgaccacttccaggcgggtatttggccctacgcagctttcggcgcgcatccggtagcctatcgtttctcccggtttttctcccagtagctccgccaggcgctgagcgacgttacgcgccgccagccgccgcggctccagcagaataatccggccatcaatgttgccgtcggcgaggatctgtagcggcagccaggttgatttacccgcgccggtaggcgcgttaagcaacacctgcggcgcctggtgcagggcggaaagaagttcgggaagaattgcggcaaccggcaatgaggacacgaaaggctccggaggttaacattcgagggcaagcattgtagcatccccgtaattcattaccgagtctctatcatgtccgagccgaaacggctgtttttcgctcttgaactgccgaaagcgatacagaaacagattattcactggcgcgccgcccatttcaccgacgatgccggaagaccggtcgccgccgataacctgcatctgacgctggcatttctcggcgacgtcagcgctgaaaagcagcgcgcgctgtcggcaatggccggacgcattcagcaaccgccgtttaccctgacgctcgacgacgcaggccagtggctgcgttcgcgcgtagtctggctcggtacccgccagccgccgcgcggcatgctgcaactggcaaatatgctgcgcgctcaggcggcgcgaagcggctgctatcaaagcccgcagccgtttcatccgcatatcaccctcctgcgcgacgcccgccacgcggtgccgatcccgccacctggtttttgctggcaggtgccggtcaacgaattcgtgctttatgagtccagctttatccgcgggcgcacccgctacaacgtgctggaacgttatccatttaccagggaattctgatgctgttcactccgcctttgcagtccgccactttaattaaacgttacaaacggtttctggccgatgtcatcacgccagaaggccaggcgctgacgctgcactgtccgaataccggcgccatgaccggctgtgccgcgccgggagataccgtctggtattccacttccgataatcctaaacgtaaatatgcacatacctgggaattaactgaaacccagcaggggccgttatatgcgtcaacacgctgcgggccaatactctggcgaaggaggcggtactcaccggaaatatccctgagcttgccggctataacattctgaaaagcgaagtaaaatatggcgaagaaaatagccgaatcgaccttatgttacaggcagaaggccgccgtaactgctatattgaagtgaaatcggttacgttggcggaaaaagagtacggttattttcccgatgccgtgactgcacgcggtcagaagcacctgcgggaactcatgagcgtcgcggccgcgggccatcgggccgtgattttattcgccgtgctgcattcggcgatagaccgtttctcacccgcgcatcatattgatgccaaatacgcacagctgttgatagaggcgcaggaaaagggggtagaaattctcgcctggaaagcggaactttctaccaaaatgatgactctgaataagccgatcgccgtggcgttaacccccggtaattaaaaggctaaattgtgtccggttcgcgagcgcaaatacgcttttcttcacagcgttgtcaagtgtaacgtttagataattgctatccggaaaagcatctgctatttatagcggcctgatttttcccccacatggggatcgatagtgcgtgttaaggagaagcaacatgcaagaagggcaaaaccgtaaaacatcgtccctgagtattctcgccatcgctggggtggagccgtaccaagagaagccgggcgaagagtatatgaacgaagcccagctggcgcacttcaagcgcattcttgaagcatggcgtaatcaactcagggatgaagtggatcgcaccgtaacgcatatgcaggatgaagctgctaacttcccggacccggtcgaccgtgccgcgcaggaagaagagttcagcctggagctgcgtaaccgcgaccgcgaacgtaaactcatcaagaagattgagaaaacactgaaaaaagtcgaagacgaagacttcggcttctgcgaatcctgtggcgtggagattggcattcgccgtctggaagcgcgtccaacagctgacctgtgcatcgactgcaagacgctggcggaaattcgcgaaaaacagatggcgggttaattcccagctacctcactctctggcgggagtttctcccgcctgattccccttgtgttaaacatgaccgattcagactatatagggcgctttgctccctcaccttctggcgaactccacttcggctcattaatcgccgcccttggcagctatctacaggcgcgggcgaaaggcggtatctggcgcgtacgcattgaagatattgacccgccgcgggaagttcctggcgccgccgacaccattttgcgccagctcgatcgctacggtctgcactgggacggcgaagtactgtggcaatcccagcggcacgatgcttatcgcgagcgcctcgcctggctacgcgatcgggatctctgctacttctgcacctgcacccgcgcgcgcattcacagcgtcggcgggatctacgacggccactgtcgcgatttgcgccttggcgccgaaaacgccgcgctgcgcctgcgccagacccgtccggtactggaattttatgaccagttgcgcgggaccctcgtcgccgacgaaccgctggcgcgggaagatttcatcatccatcgtcgcgacgggctgttcgcctataacctggcggtagtggttgacgaccattttcagggggtcagcgaaatcgtccgcggcgccgatctcatcgagccaacggtacgacaaatatcactgtatcagcactttggctggcctgtgccggactacgtgcacctgccgctggcgctgaatgccgaaggtaataagctctcaaaacagaaccacgccccggccctgccggagggcgatccgcgcccggaaattgtgcgggcattaacatttctgaatcaggatgtcgtcgaggattggcaagcgctgagtattgacgatttactcaaacaagcgatagccaactggcagccagcaaaaatccagcattctcaaatggctcccgctgagctatgattagccgctatttttgctcgtcgcccttcaggttgcccctgaatttgccgtttaaatgcaacctgaagcccatagagtaatgttttatccgaagttcgtctgacactacgaggtgcaccatttttacccgagtcgctaatttttgccgcaaggtgctaagccgtgaagagcgcgaggcagaggctgccgccgtcgaacaaacgcatatgacggtgatcccgcgtgaacagcatgcaatttcccgcaaagatatcagtgaaaacgcgctcaaggtgctctatcgactgaacaaggcgggctacgaagcttacctggtcggcggcggcgttcgcgacctgctgctcggcaagaagccaaaagattttgacgtcaccaccagcgcgaccccggaccaggtacgtaaactgttccgcaactgccgcctggttggccgtcgcttccgcctggcgcacgtcatgttcgggccggaaatcattgaggtcgccaccttccgcggccatcacgaaggacataccaccgaccgcgtcacctcccaacgcggccagaacggcatgctgctgcgcgataacatcttcggctcaatcgaagaggatgcccagcgccgcgacttcaccatcaacagtctttattacagcgtggcggacttcaccgtacgtgactacgttggtggaatgcgcgatctgcaggaaggcgtgatacgcctgattggcgacccggaaacccgttaccgtgaggatccggtgcgcatgctgcgcgcggtgcgtttcgccgccaaactccatatgcgcatcagccccgaaagcgccgagccaatcccacgtctggctaccctgctgcacgacgtaccaccggcgcgtctgtttgaagaagtactgaagcttctgcaggcgggttatggttatgaaacctaccagttgctgcgcgaatacagcctgttccagccgctgttcccgacgatcacccgctacttcaccgagcgcggcgatagcccgatggaacgcatcatcattcaggtgctgaagaataccgataaccgcctgcataacgatatgcgtgttaacccggcattcctgttcgcggtcatgttctggtatccgctgctggaaatggcgcagaaaatcgcgcaggagagcgggctggcctattacgacgccttcgcgctggcgatgaatgacgtgctggatgaagcctgccggacgctggcgatccctaaacgaatcactaccctggtgcgcgacatctggcagttgcagcttcgtatgtcccgccgtcagggcaaacgcgcgtggaaactcatggagcatccgaagttccgcgccgcctatgacctgcttgaactgcgcgcaggcgccgagaacaaccacgaactgcagcgcctggccaaatggtggggcgagttccaggtggccgcgccgccggaacagaaagatatgctcaacgacctcggcgacgatccggctccgcgccgccgccatcgccgcccgcgtaaacgcgcgccgcgtcagggtaacgcatgaccctggtctatatcgccattggcagtaatctcgcctcgccgctcgaacaagtgaatgcggctatccgcgcgctggccgacattccggacagccgcgtggtgagcgtatcttcactgtaccgtacgccgccgctggggccgcaggatcagcctgactatctcaatgccgccgtcgcgcttgaaacctcgctcgcgccagaagcgctgctcgatcacactcagcgcatcgaactgcagcaggggcgggtgcgcaaagccgaacgctggggccacgtacgctggacctcgacattatgctatttggcgatgcggttattaacagcgagcgtctgacggtgccgcactacgatatgaaaaatcgcggttttatgctctggccactgtttgaaatcgccccgcagctccacttccccgatggcctcgcccttcgcgtcgcgctggaaaatctgggcgccgaaaagcctgccatctggtaacccctactcccttttttagcatttacggcgatagtggtaatcggttgcccaaaatcattgcccccctgaatgctgctgttagaatgccggttaatatgactttcatcatcaggaaacgttatgaaaccgaccaccattgccctgctgcagaaatgcaaacaggagaaaaagcgcttcgccaccatcaccgcctacgactacagtttcgctaagctttttgccgacgaaggcattaacgtcctgctggtgggcgattcgctggggatgacggtacagggccacgattccacgctgccggtgaccgttgaggatatcgcttaccatacccgcgcggtgcgtcgcggcgcgccgaacagcctgctgcttgccgacctgccgttcatggcctacgccacgccggagcaaaccttcgaaaatgccgctgtagtgatgcgcgccggcgctaatatggtcaaactcgaaggcggcgcatggctggctgataccgtcagaatgctggcggagcgcgcggtgccggtttgcggtcacctcggcctgacgccgcaatcggtgaacgtcttcggcggctataaagtacaaggtcgcggcgatgcggcgcaggcgctgtttgatgacgcgttagccctggaagcggccggcgcacagctgctggtgctggagtgcgtgccggtagaactggcaaaacgcatcaccgaagcgctgacgattccggttatcggcatcggcgcaggcaacgtgaccgacgggcaaatcctggtgatgcatgacgctttcgggatcaccggcggccacattcctaaattcgcgaagaatttcctcgcagaagcgggcgacatccgcgccgcggtacggcagtatattgccgaagtcgaatccggggcctatccgggcgaagaacatagtttccattaaggagtcttgttgtgctgataattgaaaccctgccgctgctgcgccagcatatccgtcgtttacgccaggaaggcaagcgcattgcgctggttcccaccatgggcaacctgcacgatggccatatgaagctggtcgatgaagccaaagcctgcgcggatgtcgtggtggtcagtatcttcgtgaatcccatgcagtttgaccgcccggacgatctggcgcgctatccgcgtaccctgcaggaggattgcgaaaagctgaacaagcgcaaggtcgattttgtctttgctccagcgccggcggaaatttatccgcagggtaccgaaggacagaccttcgttgacgttccgggtctgtcgaccatgctggaaggcgccagtcgtcctggccacttccgcggcgtctcgaccattgtcagcaaactgtttaacctggtgcagccggatgtcgcctgcttcggcgagaaagatttccagcagctggcgctgatccgcaaaatggtcgccgatatgggctacgacattgagatcgtcggcgtgccgattatccgcgcgaaagatggccttgcgctgagctcgcgtaacggttatctaaccgccgagcagcgtaaaatcgccccggtctgtacaaagtgctgagtacggtagcgggcaaacttgccgcaggcgagcgtaaccttgaggaaatcattgccatcgccgagcaggagctcaatgaatcaggttttcgtgccgacgatatccagatccgtgatgccgacactctgctggagctaacggaagccagcaaacgcgcggtgatcctgatggcggcatggctgggccaggcgcgcctgattgataacaaaatcgtcgagctgggccagtagcctggaacgaaaaatcgggttattttctcaaagcggatgccgtgtccgctttgctacataaaggttggaaggtagaagttatgatgcgtaatatgctgcagggcaagctccatcgcgttaaagtcacgcaggctgacctgcattacgaaggttcctgcgccattgaccaggatttcctcgaagcggccggtattctggaaaatgaagccattcatctgtggaacgtgaccaacggtaaccgtttctcgacttatgcgatcgccgccgagcgtggttcgaagattatctccgtcaacggcgctgcggcgcactgcgcaagcgtcggcgatatcctcattatcgccagcttcgtgaccatgtctgacgaagaagcccgcacctggcaaccgaaagtcgcctatttcgaaggcaataacgaaatgaagcgccaggcgaaagccattccggtgcaggttgcctgattcttacggcgctgcgctcagccgcagcgccggtttatccttgcggctgattactgataagccgcgacatcgtctccagcgaatcggtgcgtaagatatacaaccgcttcagcaggaacggattatcccccggtttcaccttccctctcaccgtcgttaccgccagatgaaaaccggcatcgttcgccgccttgaccgccgtggcgttatagccgccgaacggatacgaaagatacagcacgtgcggattaaactgactcagcgcccgccgggaacgctcgaaatcaaagagaatgttgtgataattccggctgagtaatatcgggtgacgcgcggcatcgacccggtgtagaaaatgggtatgcgactgcacatcaaacacgtcctgaatctgcctgagctcagagatactcataaactgcagcgatttcggatcccacttttgcggatgacgtttgatccgcgacgagataataaacgccgtagcgtggaagccgtactgcttgaggatcggataagcgtagcgattcaccgacttgaggccgtcatcaaaggtaatcaccaccgagcgtgcaggcagattaaccttgttacgtaaatacccttcaagttgatacatcgtcaacgtggtataaccctggtcacgcaaccaggtcatctggttactgaaagcgcgcaccgaggtggtggtagaggtatggcgaaaacggctattttcttcatcacgcagaatatggtgataagtcagtagcggaatgccgttatcctcctgcgcatccagactactcacccatgcaagcctgttgccgatacgaatctgataccaggtctgattaaggcgatctttcagcttgctgataatgggatagcgcaagttattagctaatgtaccaaacggcggactgcccactgatggcgcatcgtatatcggcgtatctttccaggtcagcagattctggttgctcaatggctggcgtaaatcgcccaggctatcctcaacccgttttgcgccctgcaccggccccaggtgtcctttatcaataaagccagtaccgaagccaaaattgaattcataatagtctgccgtggtcggcaccacggcgaggatctgcccggcgcgaacgttgccgacgctaaccacgtgattgccgacctgcgcccagatatcggcatcttcagtgacttgcatatagcgtgcgggaacgccctgctggctgagcagactggcggaaacgctggcagatgccagaaaaaggaacaatgtaatgactcgggcaaacatgtgcatcgaaccggtaaacctgaactgccgctattgtaacaaaagcggcatcaatgctaatgcttaatttccgaacgtatcatgtagtagacgaaaaggcgggttcttttgctgctgatgccataggctgcttaccgtcggacctccggcgctaacgatagcattacggaaagcgtcactgctgaggctatagcgttgtaaatacatttcttccagtaatggatagcgaatgccggaaatgacttcacagtgagtatgtttgtgactcatcagcgcagcggcgcgatacggcgcagcgccggttttatcggtgagaaaaatcaccccatcgccgcagtctgtggcatgcagcgcatcgcacatcatgcggctcagcatattgacgctcagatttcgccagtaattcaccgcccgacattgcgccagcgggccaaactttttctccagacgatccagcatctcctgcgccagctcatcatgacaggtaattacccaacctaacatcgcctacctccttagcaggcaaacaatttagcagggcaagcgttgagatggggtgatgggtatcaaaaattaccgcttagcgccccgccacagtgaaattagcggggcgctagctgagaggattagctacgcaggccgcgcccgcgctggatcagataccagcacagaatatagaaggccacgataaacactaccagcacgccaaaggtggtcgccagcggaacgtcatgaatgccgaggaagccaaaacggaagccgctaatcatgtagacgatcgggttcaaatgcgacagcgcctgccagaacggcggcaacagcgtcagcgaatagaacaccccgccaagataggtcagcggtgtcagcacgaaagtcgggatcaggctgatgtcgtcgaaggttttcgcaaacaccgcattgagcaggcccgccagcgagaacaggattgccgtcaaaatcagcgtcagggcgacgaacaaccaggaatgaacctggaacgggacgaagaacagcgagatagccgtaaccagaatcccgacgcacagcccgcgcgccaccccgccgccgacgtaaccggcgatcaccacgtgggttggcaccggcgccaccagcagttcctcaatgttgcgctggaacttggcgctaaagaacgacgaggcgacgttggcgtaggcgttagtgatcaccgccatcataatcagccccggcacgataaactgcatgtaggtaaaaccgtgcatctcgccgatccgcgagccgatcagattgccaaagatgacgaaatagagggtcatggtgatcaccggcggcaccagcgtctgaacccagatacgcataaaccggtggatctctttggtccagatgcttttcagcgcgacccagtaaagctgcatcatgctgattctccttttttgtcgtgcaccagcgtgacaaacagctcttccagacggttggccttgttacgcatacttaatacctgcacgccctgggcgcttagctgggcgaaaacgctgttaatcccctgctcgcgcaggacttcaacttccagcgtcgaggtatcaaccagccggtactgatacccgtcgagggttggcagcgggcttttcggcgccagatcgaggataaaggtttccgatttcaactttgccaacagcgccttcattgaggtattttccaccaactcgccgctctggataatgccgatattgcggcacaacatttccgcttcttccagatagtgggtcgtgaggataatggtggtgcctttatcgttgagatctttgaggaacccccacatcgagcgacgtagttcgatatcaacgccagcggtgggttcatcaagaatgagcagcttcggctcatgcatcagcgcgcgggcaatcatcaggcggcgcttcatcccgccggagagcatacgcgcgcgttcattgcgcttttcccacagatcgagctgtttcagatacttttcgctacgcaagatagcttctttacgctcaacgccgtagtaacccgcctggttaaccacgatttgctgtacggtttcgaacgggttgaagttgaactcctgcggcaccagcccgagctggcgtttggcgttcaccacatctttttccaggtcgtaaccaaatacattaacctgaccggaggttttattgaccagcgaactaatgatgccgatagtcgtggatttccccgcgccgttcgggcccagcagcgcataaaagtcgccggcttcaacctgcaggtcaatgcctttcagcgcctgaaccccgccgggataggttttcttgagctgttttaattccagagcaatggtcattaaatatctcttctcgtgtcttcacatctaatttacccaaataattcatgttgcaggaaggcggcaaatgagcgaatccccaggagcttacataagtaagtgactggggtgaacgagtgcagccaacgcacctgcagcatgaagtatgacgggtaaagattgttttcaaaaaggtgagcttaccctatattagcgcaacgcacttacttggttacaggccgtaaacgtccatgaatgatatagatacactcatcagcaataatgcactatggtcaaaaatgctggtggaagaggaccccggcttctttgcgaaattgtcgcaggcgcagaaaccgcgctttctgtggattggctgttccgatagccgcgtccccgcagagcgcttaaccggcctggaacccggtgagttgttcgtgcaccgtaacgtcgccaatctggtgatccacactgaccttaactgtctgtcggtggtgcaatacgccgttgacgtgctggaagtcgaacacattattatctgcggtcactacggctgcggcggcgtacaggcggcggtcgagaacccggaactggggcttattgataactggctgctgcacattcgtgatatctggtttaaacacagctcgctgctcggtgaaatgccggaagagcggcgtctggatacgctttgcgaactgaacgtgatggagcaggtatacaacctggggcactcgacgatcatgcagtcggcgtggaaacgtggccaaaaagtgacgatccacggttgggcttatggtattcacgatggactgctgcgcgatcttgatgtcaccgccgtcagccgggaaaccctcgagcagcgctatcgccacgggatttccaatctcaagagcaaacacgccaaccataaatagccgccgcgctcaccgccccggataaggcgctcgccttatccgggaccgcaacaataattactcgtccagcaggatcactttgccgacatacggcagatgacgatagcgctgagcgtagtcgataccgtagcccaccacgaactcatccggaatcgcaaaaccgacaaactccaccgggacgttcacttcacgacggcttggtttatccagcagcgtacagatagccagtgatttcggctcgcgcaggctgaggatttcgcgcactttagacagggtgttgccggaatcgatgatgtcttcgacgatcaatacgtctttaccgcgaatatcttcatccaggtctttaaggattttgacatcacgggtggtggacatgccgctgccatagctggaggcggtcataaagtcgacttcatgcggcacctgaacctcacggcacaggtcagccataaacataaatgaaccgcgcagcagacccaccagcaccatttcgctgccgctgtctttgtagcgttcattaatttgacgacccagttcggcgatacgcgctttgatctcggcttccgggatcatcacttctacagtatgtttcattaaactaaccatttgattcttaggataaatcttcaaagccgttgctttcacatcgacgttgaccggcaagcgatacagtataccagcaaaacgaaatcttcggtgcagtgaataataaagccatatttgtgattccgatcacagttgttaaatcctataattaattgcagctaaaaaattaacaactgaagagtgtctttctatggcagaaacaaaatctcaacaatcacggttacttgtcacgctgacggcgctgtttgccgccttctgtggcctgtatctgttaatcggtggggtatggctggccgctatcggcggttcctggtactaccctatcgcaggcctggtgatgctggccgtcaccgttatgctgttccgcggcaagcgcgctgcgctgtggctgtacgccgccctgctgctggcaaccatgatttggggggtatgggaagtcggtttcgacttctgggcgctgacgccgcgtagcgacatcctggtcttcttcggcatctggctgattctgccatttgtctggcgtcgtctgccggtcccttccgccggcgccgttggcggtctggttatcgccctgctgattagcggcgggatcctgacctgggccggtttcaacgacccgcaggaagtgaacggtacgctgagtgctgacgcgacgccggccgctccgatttctaccgtcgccgatagcgactggccggcctatggccgtaaccaggaaggccagcgttattcgccgctgaagcaaattaacgccgataacgttaagaacctgaaggaagcctgggtattccgcaccggcgacctgaagcagccgaacgatccgggtgaaatcactaacgaagtgacgccgattaaagttggcgacatgctgtatctgtgtaccgcgcaccagcgtctgttcgcgcttgacgcggccaccggtaaagagaagtggcattttgacccgcagctgaacgccgatccgtcgttccagcacgtgacctgccgtggcgtctcctatcatgaagccaaagcagataacgctcctgccgacgtcgtcgccgactgcccgcgccgtattattctgccggtcaacgatggccgtctgttcgcggtgaacgccgacaacggtaagctgtgcgaaacctttgccaacaaaggcattctcaacctgcaaaccaatatgccggtaaccacgccgggtatgtatgaaccgacgtcgccgccgattatcaccgataagactatcgtcattgccggcgcggtaaccgataacttctcaacccgcgagccatcaggcgttatccgcggctttgatgtgaataccggtaaactgctgtgggccttcgacccgggcgcgaaagaccctaatgcgatcccgagcgatgaacatcacttcacactcaattcacctaactcctgggcgcctgccgcctatgacgcgaagctggatttagtctatctgccgatgggcgtaaccacgccggatatctggggcggcaatcgcacgccggaacaggaacgttacgccagctctatcgtggcgctgaacgcaaccaccgggaaactggcgtggagctaccaaaccgtacaccacgatctgtgggatatggatatgccgtcgcagccgacgctggccgacattgatgtgaacggtaaaaccgtaccggtgatttacgctccggccaaaaccggtaacatcttcgtactagatcgccgtaatggcgagctggtggtcccggcgccggaaaaaccggttccgcaaggtgcggcaaaaggcgattatgttgctaaaacccagccgttctccgagctgagcttccgtccgaagaaagacctgaccggcgcagatatgtggggcgccaccatgtttgaccaactggtgtgccgcgttatcttccatcagatgcgctatgaaggtatcttcactccgccgtctgaacagggcacgctggtattccctggtaacctggggatgtttgaatggggcggtatctccgtcgatccaaaccgtcaggtggctatcgccaacccgatggcgctgccgttcgtctctaaattgatcccacgcggcccgggcaacccgatggaaccgccaaaagacgcgaaaggctctggtaccgagtccggcgttcagccgcagtatggcgtcccgttcggcgtcacgctgaacccgttcctgtcgccgtttggcctgccgtgtaaacaaccggcatggggttatatctcggcgctggatctgaagaccaacgaagtggtgtggaaaaaacgcatcggtacgccgcaggatagtctgccgttcccgctgcctgtcccgctgccattcaatatgggtatgccgatgctgggcggaccgatctcaaccgccggtaacgtgctgtttatcgccgccaccgccgataactacctgcgcgcttacaacatgagtaatggcgaaaaactgtggcaggcgcgtctgcctgcaggtggccaggcgacgccgatgacctatgaagtgaatggcaagcaatacgttgtcatctctgccggcggtcatggctcgttcggtactaaaatgggcgactacatcgttgcctatgcgctaccggatgacgcgaaataaaacgcaaaacggcaacgaaagttgccgtttttttgtttgcccctcccctatgggagagggcggcaggccgcatagtcctaaacggtgaaccccaacatcattccggtgtcttcatgctccagcagatgacagtgagccatataggcaaactccttgggcgcctgatgatcgaacttcaccagcacttcactcaccccgccctccactcttaccgtatccttccagccgcgacgatgcgccgctggcgcctggccattttcactcagaatacgaaattgcgtgccatgaatatggaaaggatgcagcatcatgtcgcccttaccggatatcagccagcgctcgtactgccctctggccgcggcaaacatcggcacattcatatcaaaggctttaccgttgatgcggttggcgttatggaaatcgaagcccttatccgatgaagcgccatgtcccattccgccgccatggttcatattcttcatctgaccgtgattcatattgcccatatcgccatgatccatcatcatcccatggttcataccggacatcgcctggtcgccatatttcttcatcagcgcctgcattcccatcatgtcgagcataggatccattgatagctgcagcgtgcgctgcgtcatgccctccagtgacggtagcgcgggcagcgcggccaaagtatcgggtagcttaccggatgccgggatcaatagcggctgtatacgaagcaccggctgtggcttatcaaatggcgcaatcgccatccccatctggctaaccggcagcgtcaggagatcaaatgcctttccatcgcgggtatcaatcaatacctcaaagcgctcgcccattagtaccggcagttcgctcacttttatcggttccgctaacaggccgccgtcgcttgctactacatacattgggcggcgatcgctggtagcgaaattcagcgagcgggcattacaaccattaagcagacgcaggcgcagccaaccgcgcggcggagcgtgttcgggatacagcgcgccgttagtcaacagggtatcgccaaaccagccaacggcggcgctcatgatatcgagctggtaatctatttctccattggcattgaatcttttgtcctgcacgatcaccggaacatcatcaattccccactgcttcggcagcagtaattgcccgctctcgacatcttcaatcagcaccaaacccgccagccccatcgcgacctgacggccggttttaccatgctgatgaggatggaaccagcaggtcgccgctcgctgcgtcggcgtaaaactcaccgtccttgaggctcctgcggcgatgacgccctgcgggccgccatcgacttcgccaggcacttctagtccgtgccagtggaccgtggtctcctccgccaggcggttatgaatatctaccgtcaccgcttcaccttgcttcagcttcaacgcgggcccaaggaggctgccgttataaccccaggtcgtcgcaagatgcgggccaaactgcgtctttccggcttgaatcgtcagcgtaatgcgattgcgcgcgtcggcggtcaataaatccgggaccggcaaagccggacggccagcagcgaataccgaacggctccagagcggtaaggcgctgaccacgccaagcgcggcgcttaatttgataaactcacgacgttgcattttcacatccttttattctgctggtgaatatttaagcttaaaccctcccgcaacgggaaggtcaagcagaagcttgtgaataaagctctgcgtggtgtaaagaagtatgctaactttgattgtccgtgtttcaatggtagaaaaaatgaagacgtttttcagaacaatgctgtttggcagcctgctcgccctctccgccaatagctatgcattaagcgagtccgaagcggaagatatggctgatttaacggcggtatttgtattcctgaaaaacgattgcggctatcaaaatttgccgaatacgcaaatccgccgcgcgttggtcttttttgcccagcaaaaccaatgggacctcagcaactacgatagctttaatatgaaagcattaggtgaggacagctatcgcgatctcagcggtatcaaaatcccgaccgccaaaaaatgtaaagccctggcccgtgactctctcagcctgctggcctatgtgaagtaagcgtatctgtagccgccgcgatgcggctgcatctgtgtattcacgcctccccatctccaccagcattgacgaaatatgaattcattcactgatattttttatttcacgcccctatttttctttatttttattaattaaccaaaagtttaatttatccgtaaaaatcacattcgagagtaaataattcaactcctcatttattgcaaagaccaacaggacaattaaaatcgctggcaacctctcttattgccatggaatgacattttgaatatctcacctatttttcgcttatttcccttcgctattatcatgttagcgggttgccaggcacatcgtcaggctaacgctcccataacgccaccaatcgtcatcgctaccgacgcgcaacagaatgaaaagctgcgactggccgctgagcaggagcggcttaatgcctgccgccaggcgttggattcgttaaaagaagttaatccgaaagaagcctcaagactgggtagtgaattcaccgccctgataggtgcggcgtcgcaatataattcagtgcgaacgaaagtcgccgatccaacccgtcagggcatcgattccatgtatcaatttaaatccattaagctttgcgccgatattgaaaagtcgctgatcgatagtctggtcatgcgcggcgataatgcggtgaagtgacaggcgctatgataattcgccttaatatattgacgctggccttcattttgctggcgtccttttttattggtcatgcgcaagcggatgacggcgcgcctgcgtttctcaactatgtccagcagcaggagaaaaaagagaacaaagagaacaaagagatacctccggcaccggaggtcagtaaacccgccagggcccgcgagaacaatacggcagcactgcaaaaaaaactggccgcgcaaaaaagtctcatcgccgacaaagataagaccatccgccagctgcaggcacagctaaaatcacaacctcccgccacggcaccagcgtcggtagataattcagcgttgaataacaccatcgcacaactccagggtcggataaccacgctggacacggaaaacaagcggcttgttcagcaagcccgcaccgtccagcaggaaaaagccaacggcgcggataatctcaaacgctctgccgacgctctgcagacgcaaacggtaaagctcaacgcgctggagagagacaagcaggccctgagcgacaagctggctgcggcaatggcggagaaacagaaactgagcgccgaactcgccgcagtaaaaaccaccaccgccacgacagccaaatcgcccgcactaaacctcagcagcgcctcacagcagcaggcatattccgtcggcgtgtcgatagggcaagatgcacttaaaacgctgtccagccaggcagctaaagggttaaacctgcaacaggaaaccgttattaagggcgttaacgatgcttttgccggtaagccggcgctggatgaacaagcgcgcaataaggcgcttttcgacgtctcacagcggttatacaaaaacattgataagcttgagcaacaaactcgccgcgaaggcaaaacatatcagcagaaatttgccgcgcagaaaggcgtagcgcttaaagagggtatttacagccgcatagattaccccggcaaaggtaaggtcggtgaaaacgatatcgtcaccgtcgttatcaaagaaagcttgatcgacggtaccgtgataaacgatatggaagccgaagataaggtctggtcacaggcgctaagtcagtatcccccgaccttccgtgaaccgcttaaacgcctgaataaccatggcaccatcactatcgtggttccaccggagcgggcttacggcagcaaagggatccctggaaaaattccgccgggtgcgacgatggtgtataccgtccgaattgttgacgtcaggctcaacagcgatcaacaacctaaagcacctgtgccgaaagcctcacgctaagcaagagatcggccaaacagcagatggtttactattcgccatatcaatctctatctatagttggctatgatgtggtgcccgctttgcgggcgcgacagaagttaacgaaggaggagtaagccatggccgagagtaatcactggcatgagacgctgcatgaccattttggtcaatattttaccgttgataacgtgctgtaccatgagaagaccgatcatcaggatttaatcatcttcgaaaacgcggcatttggccgagtgatggcgctcgatggcgtggtgcaaaccactgagcgcgatgagtttatttatcatgaaatgatgacccacgttccgctgctggcccatggtcacgcaaagcacgtgctgatcatcggtggcggcgatggcgcgatgctgcgcgaagtctcccgccaccaacatatcgaaaccattaccatggtggaaatcgacgccggggtggtctcgttctgccgtcagtatctaccaaaccataacgccggcgcctatgacgacccgcgctttacgctggtgattgatgacggcgtgaacttcgtcaaccaaacgtcacaaacctttgatgtcattatctccgactgtaccgacccgatcggccccggtgagagcctctttacttcggcgttttatgccggttgtaaacgttgcctgagccccggcggaattttcgttgcccagaatggcgtaagcttcctgcagcaggatgaagcggttggcagccatcgcaagctcagccactatttcaccgatgtcagcttctaccaggcagcgatcccgacctactatggcggtatcatgacctttgcctgggcgaccgataatgaagccctgcgtcatttgtcgacggaaattattcaggcccgcttccatagcgccgggctgaaatgccgttattacaatccggcaattcataccgcggctttcgcgctaccgcaatacctgctggatgcgctgactgccagctaacctgaaacgaggaggtgaaccaaattgaaaaagcttaagctgcacggcttcaacaacctgactaaaagcctgagtttttgtatttacgatatctgctacgctaaaaccgccgaagagcgcgatggctatatcgcctatatcgatgaactctataatgccaatcgcctgacggaaatcctctccgagacctgttcaatcattggcgccaacatactcaacatcgcacgccaggattatgaaccgcagggcgcaagcgtcaccattttggttagcgaagagcctatcgatccgcagcttatcgatcagagcgagcatccgggcccgctgcctgagaccgtggtcgcacatctcgataaaagccacatctgcgtgcatacctatccggaaagccatccggaaggcggtctgtgcaccttccgcgccgatattgaagtctccacctgtggagtgatttcaccgctgaaggcgctgaactacctgattcaccaactggaatcagatatcgtaaccattgattatcgcgtgcgtggtttcacccgtgatatcaacggcatgaaacattttatcgatcatgaaatcaactctattcagaacttcatgtcagaagatatgaagtcgctctatgacatggtggacgtgaacgtctatcaggaaaatatgttccataccaaaatgatgctgaaagagttcgatctcaaacactacatgttccacaccaaaccggaagagttaagcgagcaagagcgcaaggtgattaccgacctgctgtggaaagagatgcgggaaatttattacgcccgcaatatacctgcggtgtaatgcctgaaatgcccggcggcgcttttgcttgccgggcctacggggttccgcaccgcccggcaccgaacgaatcattaacgctgctgcataaattcacggtatgcggcaaccacctgcaggaaatcctccacaccgcaaagagagaggctctcttcgtcgtagtaattcatcccctcttccatttcatcgccggaaaattccagttggttggcgcggatcatcacttcttcgccatccagccacaacgtatattcatggccggcccgctgccaggaacgttcactgcctttcacggtgcgcgctgcctgttccacttcatccagaagggccaggttatctttcacctcttcgttgaaccagtgcccaatcgcctcgtggtccatcgacattcgcacctttaccacaccggtaatatcgcgcagaaattcgtaatccataatcttttcctctgcaagggcaatgcgtcaccgctgcactgtacccataacctaattatcgcagcagacaggaagaaaaaaagcgcaacgggtgggaggtttaaaaataaaaatgcccgctgatgcaatgttcagcgggcattggagagtttgtagccaaacggccagccaggctgaccgaacggattacacggcggtctggaagattacgccatcagctttttcagtgtactgatccagctggttaaagttcaggtagcgataggtatcttccgccgtcttatcaacctgagcgacgaaggtctggtactcttccggcgtcggcagtttgcccagcagagaagcgaccgccgccagttcagcagaggccagataaacgttggcgccggtacctaaacggttcgggaagttacgggtagaggtcgacacgaccgtcgcgccgtcagccacacgcgcctggttacccatacacagggaacagccagggatttcgatacgcgcgccgctcttaccaaacacgctgtagtagccttcttcagtcaactgcgcagcatccatacgggttggcggcgccacccacaggcgagtcggcagttggcctttatggctgtccagcagcttaccggcagcacggaagtggccaatgttagtcatgcaggaaccgataaacacttcgtcgattttctcaccctgcacgtccgacagcagacgcgcatcgtccggatcgttcggtgcgcacaggattggctctttgatatccgccagatcgatgtcgatcactgccgcgtattccgcatcagcgtcggcttccagcagctgcggatccgccagccatttttccatgccctggatacggcgctccagcgtacgacgatcgccgtaaccttctgcgatcatccacttcagcaggacgatattggagttcagatactcaacgatcggctctttgttcagcttgatggtacaacctgcagcagaacgctcagcggaagcatcggtcagttcaaatgcctgctcgactttcagatccggcagaccttcgatttcaaggatgcggccagagaagatatttttcttccctttcttctcaacggtcagcaggccctgcttgatagcatacagcggaatggcgtgaaccagatcgcgcagggtaatgcccggttgcattttacctttgaagcgcaccagtaccgattctggcatatccagcggcatcacgccggtcgcggcggcgaaggccaccagacctgagcccgccgggaaggagataccaatcgggaaacgggtatgggagtcaccgccggtacctacggtatcaggcagcagcatacggttcagccaggagtggataacgccatcgcccggacgcagtgaaacaccgccgcggttcatgatgaagtccggcagagtgtggtgcgtggtgacgtcaaccggcttcggataggctgcggtgtggcagaaagactgcatcaccaggtccgcggagaagcccaggcacgccagatctttcagctcatcacgggtcattggaccagtggtgtcctgagaaccaacggaggtcattttcggctcgcaataagcgcccggccggataccggcaacgccgcaggcgcggccaaccattttctgcgccagagagaagccgcggttgctttccgccacgtctttcgcatgacggaagacgtcgctgtgcggcagccccagcgcttcgcgcgctttggtcgtcaggccgcgaccgatgatcagcggaatacggccaccggcgcgcacttcgtcgatcagtacatcggttttcagttcgaagcttgccaacagctcgttggtttcgtggttacgcacttcgcctttgaacgggtatacgtcaatgacgtcgcccatgttcaggttgctcacatccacttcaataggcagcgcgcccgcatcttccatggtattgaagaagataggcgcaattttgccgcccaggcacagaccgccgccgcgcttgttcggtacgttagggatatcgtcgcccatgaaccacagcaccgagttggtggcggatttacgcgaagaaccggtaccgacaacgtcgccaacgtaggctagcgggaagcctttctgctgcagcgcttcaatttgtttaatcggaccgaccgcgcccggctgatccggttcaataccttcacgagcgtttttcagcatcgccagagcgtgcagtgggatatccggacgggaccaggcgtcaggcgccggagacaagtcatcggtattggtttcgccggtaactttgaagacggtaacggtgattttttccgccagctgagggcggttcaggaaccactcggcatcagcccaggattgcataacctgtttagcgtattcattacccgctttggctttctcttctacgtcatagaagttatcgaacatcagcagggtatgggacagcgctttcgccgcaatcggcgccagttttgcatcgtccagcgcttcaatcaggggtgaatattgtaaccgccctgcatggtgcccagcagttcaacggctttttcaggggtaaccagtggggaggtcgcttcgcctttggcgatagcggcaaggaatccggctttaacataggcggcttcatcgacgcccggcggtacacggttggtaagcagatctaacaggaattcatcttcacccgctggcgggtttttcagcagttctaccagcgcggccatttgggttgcgtctaagggtttggcaacaatccccatggcggcacgctcagctacgtgcttacggtattcttctagcacgacggttctcctcgctctcattgtaaaatgcggtaggcgattttcttcacgctcctgtgagacagcagtttgtagggtaaatgcccgataccgcgagggcagcatagcaggatttttgaagggtgttaatctgtttacaaaaaagcaacattaaaatttagctgaatcgttaagggcaggatattgcaggctttctgttcaaatgctggtagataaatttatttctgttacagatttaatgtcaggatcccaacaaaaatcaaaaaaaacaatatcgtcttcatatactcccgtaacgtaccgttttcgccgatacttgagcgagatgggtaacatttctgtgtcaggagcttccatgtcactaccgttcaaaccccatattatcgccctgctctgtagcgccggcttactcgcggcggcgggaacgctatatgttaaaagccgtaccccagagactatcgctgaagcgccggtgacggcgcagcctgtgccaacgacagcaccagcgactgcgccagcgcaacctgtcgccgccacctatacccaggcgcaaatcgaccaatgggtcgcgccaatcgcgctctacccggacagtttactctcgcaggtactgatggcctccacctatccggacaacgttatgcaggcggtgcagtggtcgcaggataacccgtcgatgaaaggcgacgctgccgtgcaggccgttgccagccaaccgtgggatccgagcgtcaaatccctcgttgcttttcccgccctgctggcaatgatgggcgaaaacccgccgtgggtagaaaaccttggggatgcatttttagcccagccgcacgatgtgatggattctgtacagcgcctgcgcgccattgcccaacaaaccggaacattaaaatccacgccgcaacagaaagtgaccgtcacggccgctgcgccggcctcttcgacgtcatcgaatagcagcacggtatcaacctcgacaacctcaacggcatcgccagcaccttcgcagatcatcaaaattgaaccgaccaatccgcaggtggtatacgttccaagctataacccttcgaccgtctacggcagttggccgaatagcgcctatccccggtctatctgccgcctcctccggggagcagttcaccgatagcttcgtcaaaggttttggttacagcctcggcgtcgccaccacctgggcgctcttcagcagcatcgactgggatgatgacgatgattaccatcatcatgatgacgattaccatcacggcggctaccagcacaatggcgataacatcaatattaatgtgaataatttcaaccgcattaccggacagaatctgccgggtaaccgcgttaactggcagcacaaccccgcctatcgcggcaacgtgccttatccgaataataatgtcgcccagcgctatcatcagaccaatgtacccggcggactcagcgcgacccagcatacgccggtcgatcgcaacgctcaacggcaagcggcgatgacgcagcttcagcatcccaacgcgccagccgccagcgcaggcaagctggtggccactagcgcctcgcgtgatgcgcagcgtcaggcggcctctcaacaattgaagcaggtcacccagcgcagcagctaccgtggctacgacagcacgccgacgccagccaaacagcagcgtcgcgaagcggcgaaaacgcagttgcaacatccaacgccgcagcagcaacagcatcgcgaaaccgtgaagagccacgtgcagaatccaacgcctcagcaacaacagcgccgtcagcagattcactccgtgacgccggcccaacgtcagcaagcggtgagcacggtgcgcgcccatgccttaagcggcaacgaaagtcgatccccctcctggcaatcgcagcaggcgcgcgggctgcaaagccgtaatatttccggcttgagcagcgaacagcgcggcgccgccagagagcgtctttccgaacatcatgaattgcgtcgtcgctgaggatgagcagatgagaaaaccattacagatcgtcctattaacgctaatgctggcgccgctcgccgccttcgcccagcaacagttttccacgccggaaaaagcagcgagcgcactggccgatgcgctcaatcatcgtgataaagccgcgctcaataatctgctcggcgataactggcatcagtttttacccaccgacggtattgatcctactgctatcgaccgctttcagcgcgactggcaggtgaaacacatcattgtgcagcagggtaataacgcctggcttgatgtcggcagcgaagcgtggcggttgccaattcctattgtcaaagatgaacagggctggcgttttgatatggcggccggagaagatgaaattctcacacgcgccatcggccgcaatgaactgtcggcaatttccgccatgcacgcctacgttgatgcccagcaggattactatcaaatgaatcatcgctgggcgcaaaaaatcatcagcagcgaaggcaaaaaagatggcctgtactggccaaccttaccgggtgaaacgccaagcccgctggggccagcatttagcccgacggagcccggcgccggttatcatggctaccgcttccgtattattggcgataacgataatcaaggcgtcgctttacttgcctggccggtagagtggggagaaaccggggtgatgagctttatgatcgatcagaacgataaggtctggcaggcgaacctgggcgaagagagcgcgacgaaagcgcaggcaattacgcactttacccccgattcagcggcgggatggcaggcggtcaatcaataaaaaaatgcccggttgcgcgatagcaaccgggcactcttttgtgcttagccctggtgcggcatcagctccggataaccggcaaaagctggtttctgactggtcagcgccgcttcatccgagctgatgctcccggaattcgccgcccacaccccttcattcgtcttcgtcaccaactgatgctgcgcattcagatcctggcccatcgccgcaatatgggtattttcagtaccgccgctgttcgccgcccatggaatggttgcatcagccgcgcaggccataccggatactaacgtcgtggctaacagcgccgtagtcaataagcgtttcatctcacacctcagatacataattaactacctattagtttaccgagtgactattttcaaagtatgtatgaggtgtagcggtttgtgaacagggacatagttctaaacattagcgataaaaaaagcggctctgagagccgcttatgcattttagcggaaagaaaaagttactttttcttcgctttagcgtttggcaggtcggtaatgctaccttcgaagacttctgccgccaggccaacggactcgtgcagagtcgggtgagcgtggatagtcagcgcgatgtcttcagcgtcgcagcccatttcgatagccagaccgatttcaccgagcagctcgccgccgttggtgccgacaatcgcgccgccgataacacggtgggtctctttgtcgaagatcagtttggtcataccgtctgcgcagtcggaagcgatagcacggccggaagcagcccacgggaaggtggcggtttcgtagctaatgcctttctctttcgcttctttctcagtcaggccaacccatgctacttctggctcggtgtaggcgatggatgggataactttcggatcgaagtagtgtttcaggccggagataacttctgcggcaacgtgaccttcatgcacgcctttgtgcgccagcatcggctgaccgacgatatcgccgatagcaaagatgtgcggcacgttggtgcgcatttgtttgtcaacgcgaatgaagccgcgatcgtcaacttccacgccagctttgcctgcgtcgaggtttttaccgttcggcacgcggccgatagccaccagcaccgcgtcgtaacgctgcgcttccgccggggcttttttaccttccatggaaacgtaaataccgtcttcttttgcttcaacggcagtcactttggtttccagcatcaggttgaatttcttgctgatacgcttggtgaagactttaaccacgtctttgtcggcagccgggataacctggtcgaacatttcaaccacatcaatctctgaacccagcgcatggtatacggtacccatttccagaccgataataccgccgcccataaccagcatgcgtttcggtacagatttcagttccagagcgtcggtggaatcccaaacgcgcggatcttcatgcgggataaacggcagttgaatcggacgggagcccgccgcgatgatcgcgttgtcgaagttaatcacggttttgccgttttcgccttcaacttccagggtgttagcgccggtgaatttacccagaccgttaaccaccttcactttacgacctttggccatgccagccagaccaccggtcagctgagtgatgactttttctttccaagtgcggatcttgtcaatgtcggttttcggttcgccgaaaacgatgccgtgttcggccagcgctttcgcttcttcgataacttttgcaacgtgcagcagtgctttagaagggatacaacccacattcaggcaaacgccgcccagcgagctgtaacgttctacgatgacggtttccagacctaaatcagcgcaacggaaggctgcagagtaacctgcaggaccagccccaagtaccacgacctgagttttgatttcagtactcatcatgacctctgtaatttatatccggcgggtctgacgcttttattattacgcccaagtccaccgggacgttctatccgcgtgtattttacaaaattgttaacaatttttaaacaacaaacggcaaacgattttgtcctttgttgctgataatccccaacagagtgaggttatcagaaaaaagccggccgtcaggccggctttttcgattacatcaccaggcggcgaatgtcgctcaaggtgttgttgatgatggtaatgaagcgagcaccatcagcaccgtcgatgacgcggtggtcgaaggacagagagatcggcatcatcagacgcggaacgaactctttaccattccataccggctccatcgcggacttagacacgcccaggatggccacttccggcgcgttaacaatcggcgcgaagtgggtagtacccaggccgccgatgctggagatggtgaagcaaccgccctgcatttcgccagcagtcagcttgccatcgcgcgctttcttcgagatggtggtcagctcacgagacagctcggtgatgctcttcttgttcacgtctttaaagaccggaaccaccagaccgttcggagtatcaaccgccacaccgatgttgatgtatttcttcagcgtcaggcgctgaccatcttcggacagcgagctgttgaagcgcggcatctgctcaagcgcagcggcaacggctttcatgatgaagaccactggggtgaatttcacgtccagtttgcgcttctcagcttcggcattctgctgcttacggaacgcttccagatcggtgatatcggttttgtcgaagtgcgtaacgtgcgggatcatcacccagttacggctcaggttcgcaccagagattttctggatacgacccagttccacttcttcgatttcgccaaacttgctgaagtcaactttcggccatggcagcatgcccggcagaccgccgcctacggcagcagccggtgcggattcagcgcgtttaaccgcttctttcacgtaagcctgaacgtcttcgcgcaggatacgacctttacggccagtccctttcacttttgccaggtttacgccgaactcgcgcgccaggcggcgaatcagcggagtcgcgtgaacgtaagcttcgttttcagcgaattcggttttaccttccgctttagcagccggcgcggcagctttctgagccggtgcaggtgcagcagccggtgccggtgccgcagcctgagccggagcagcagcaggcgcagcgccttccacttcaaagaccatgatcagagagccggtggatactttgtcgccggtgctgattttgatctctttaacggtgcccgcgaacggcgccggaacctccatagaagctttgtcgccttcgacggtgatcagtgactgctcagcagccactttatcgccgactttgaccatcacttcggtgacttcaacttcgtcgccgccgatatccggtacgttaacgtctttcacgccagccgcagcagccggtgccgcggcagccggagcggcagcctgtgccggagcggctgcaggcgcagcgcccgccacttcgaagatcatgatcagggagccggtagacactttgtcgccggtgttgattttgatctctttaacggtacccgcgaacggcgccggaacttccatagaagctttgtcgccttcgacggtgatcagggattgctcagcggcaatggtgtcgcccactttaaccatgatctcggtgacttcaacttcatcgccgccgatatccggtacgtgaacttctttcgctgcgcttgccgccggcgctgctgccggtgccggagcagctgctttctcttcctgcgcaggtgcagcggctgctgcaccctcggcggaatcgaaaatcatgatcagtttgccagtctcggttttgtcgccgacggagactttaatctctttcacaacgccagcctgcggagacggaacttccatagaggccttatcgccttctacggtgatcagcgactgttcagcttcaactttgtcgccaactttgaccaggatctcggtgatttcaacttcatcagccccgatgtccggtactttgatttcgatagccattattctcttacctcttacgccagacgcgggttaactttttctgcatcgatgtcgaatttagcaatggcgtcagccacaactttcttatcgatttcaccacgtttagccagttcgcccagcgccgcaacgaccacgtaggaagcatcgacttcgaagtggtgacgcaggttttcacggctgtcggaacgaccgaagccatcggtacccagtacgcggtaatcatcagccggtacgtaagtacgaacctgctcggcgaacagtttcatatagtcagtggatgccacagccggagcgtcgttcatcacctgagcgatgtacggtacgcgcggagtttccagcgggtgcagcatgttccagcgttcgcaatcctggccatcacgcgccagttcggtgaaggaggtgacgctatacacgtcagaacccacgccgtaatctttcgccaggatctgcgctgcttcacgaacgtgacgcaggatagaaccggagcccagcagctgaactttacctttgctaccttcgatggtttcgagtttgtagatacctttacggataccttcctcggcgccttccggcattgccggcatgtggtagttttcgttcagcgtagtgatgtagtagtaaacgttctcttgcgcttcgccgtacatacgtaccagaccgtcatgcatgatgacagcgacttcgtacgcgtaagacgggtcgtaggagatacagttcgggatagtcagcgactgaatatggctgtgaccatcttcgtgctgcagaccttcgccgttcagcgtagtacgaccggaagtaccgccgatcaggaagccgcgagcctgctgatcgcctgccgcccagcacagatcgccgatacgctggaagccgaacatcgagtagtagatgtagaacggaatcatcggcaggtcgttggtgctgtaggaggtcgcagcagccagccaggatgcgcctgcgcccagctcgttaataccttcctgcagaatctggcctttctcgtcttctttgtagtatgcaacctgctcacggtcctgcggggtgtactgctggccgttcgggctgtagataccgatctgacggaacagaccttccataccgaaagtacgcgcttcatcggcgatgatcggcaccagacgatctttgatcgacttgttcttcagcatcacgttcagggcacgaacgaaagcgatagtggtagagatttctttgttttgctcttccagcagcgcgctgaagtcggccagggtcggcagctccagtttctcagtgaatttaggctgacgagtcggcaagtagccgttcagcttttcacgttgagcgtgcaggtaagtgtgctcttcggaaccttccgggaaggtcacgtacggcagtttttcgatatcggcatcagccaccggcacgttgaaacgatcgcggacgtagcgaacgccgtccatgttcattttcttaacctggtgcgcgatgtttttaccttccgcggtgtcgcccataccataacctttaatggtatgcgccagaatcacggtcggctgacctttggtttcctgcgcttttttcagagcagcgtagactttcttcggatcgtgaccgccacggttcagggcccagatctgctcgtcagtccagtcggcaaccagcgcggcggtttccggatatttaccgaagaagtgctcacgaacgtaggcgccgtctttggatttgaaggtctggtagtcgccgtcaacggtttcgttcatcagctgaatcagcttaccgctggtgtctttacgcagcagctcatcccaacgaccgccccagataaccttgataacgttccagccagcaccaccgaagatgccttccagttcgttaatgattttaccgttaccggtgaccgggccgtccagacgctgcaggttgcagttgatgacgaagaccaggttatccagtttttcacgggtcgcgatggtgatagcgcctttagattccggctcatccatctcgccatcgcccaggaaggcgtaaacggtttgcgcagaggtgtctttcagaccacggtgttccagatatttcaggaatttagcctgatagatagcgcccaacggccccagacccattgatacggtcgggaactgccagaattccggcatcagtttcgggtgcggataagaggacagaccattaccgtgaacttcctgacggaagttgttcatctgctcttcagtcagacgaccttccaggaaggcacgtgcatatacgcccggagagatgtggccctggaagtaaaccagatcgccgccgtctttctcagtgcgcgcacggaagaagtggttgaagcagacttcgtagaaggtagcggaagactggtaggatgccatgtggccacccagctccagatctttcttcgatgcgcgcagaacggtcatgatggcgttccaacggatcgctgaacgaatacggcgttccagctccagattgcccgggtattccggttcatcttcaacggcaatagtgttgacgtaattatgcgctgccgcaccggccgctactttcacgccgcctttgcgggcctcagaaagaagctggtcgatcagatactgagcacgctcaacaccttcttcacggatgaccgattcgatcgcctgttgccagtcgcgagtttcgatcggatccacgtcattctggaaacgttctgacatggggtattccttatctatctaatcgttgatttaactggaacctgtcccattgaactctttagcgtttcactcttatgaacaaccaagaattcaataagacaggttctgcgtttagttgccgcgctctaaaaaatggcgcttaagaaccggagttctcgtcctttcgttgctgtaaacgacgcagtgaacgttctctacgactctgttcacggctacgatccagcaaaatttcctcaatgaacgccaggtgacggtgcgacgcctcacgcgcctgctccggctccccggccattatcgcctcgaaaatacgagtacgatggttgctgaccaacgggagcatttcccggcgggcatacagcaattcaaagttctgacgaacgttctgtgccagcatcggctccatacaccttagcagatggagcaacaccacattgtgcgccgcttcggtgacggcgatttggtactggacgacagcgccggattcggcgtcgagatcgccggactgttgggcccgctcaatggcttgatgcagctcgcgaatacggtcgcgatcttcatcattgctgcgcagcgccgcgtaataagccgcgatgccttccagcgcgtgacgggtttccagcaaatcgaattgggattcagggtggtcggacaggagctcgaccaacgggtcgctaaagctctgccacaggctgctttgtacaaaggttccaccgccctggcgacgaagcaacaggcccttggcttcgaggcgttgaatcgcctcacggagcgagggacgggaaacgtcgaactgttttgccagttcgcgttcaggcgggagtttttcaccggggcgcaacgtcccctcaagaatcagaaactccagctgctgctctatcacatcagaaagttttggttggcggatcttgctgtaggccatattccctgtctctgccattcgcccggagtcaattggtcttaccaatttaaagttcgtagcgctaaagtaacaaagtattcacctcctgtccatacaggttttgattgaaatcagtaaacctggccttttttaacaaccttacagaaataacgtttcagaaatgtaaccttgcacaaaacttacatttacccagcaaggggtagaattaactttatataaacgaaaaattacgctttctgaaccgattcaagaagcgaaaaagtgcatttataaaccaataaagtgaatagataaccaaataagggtaacggcggcggtggtaagaaaaaatgacaaacggtgtctttttgttcgttccgtcatcatcccttcataaagcaggtgcattcgcgcgcccttaccattattctccatcagacgaaaggtctttgagggaatttccgcctttctttccgtaaagaaatcaatacaaaaatggaatttcataattacacaaacacaacaatgtgtgcgttgcgtcactcgggtaaaaactggcctcaaacgccttgaaattagctaactatgctatttggcagagacggacagcaaagcagcaacctgaaggatgaagcgtataaacataataaccacacacgaggtttcatgatggaaggtcaacagcatggcgatcgactcaagcgcggcttgaagaaccgccatatacagctcattgcgctaggaggcgctattggtacgggcttattcctgggtagtgcgtcagtgattcaatctgcaggtcctggtattatcctcggctacgctatcgccgggtttatcgccttcctgatcatgcgtcaactcggcgaaatggtcgtcgaagaaccggttgccggttcattcagccattttgcttataaatactggggcggctttgccggctttgcctccggctggaactattgggtgctgtatgtgcttgtcgccatggcggagctgaccgccgtgggcaaatatatccagttctggtggccggaaatccccacttgggcctcggcagcggtcttcttcatcgccattaacgccattaacctgaccaacgtaaaagtgttcggcgaaatggaattctggttcgcgattattaaagtcgtcgcggtagtggccatgattctgttcggcgcctggctgttgttcagcggcaacggcggcccgcaggcgacggtcagtaacctgtgggatcagggcggtttcctgccgcacggcttcaccgggctggtgatgatgatggcgatcattatgttctccttcggcggtctggaactggtgggcatcaccgcggcagaagcggacaacccggaaaagagcatcccgaaagccaccaaccaggttatctaccgtatccttattttctatgtaggctccctggccgtgctgctctccctgctgccgtggacgcgcgtcaccgccgataccagcccgttcgtgctgatcttccacgaactcggcgacacactggtggcaaacgccctcaacatcgtggtgctgaccgccgcgctctcggtttacaacagctgcgtgtactgtaacagccgtatgctgttcggcctggcacagcagggtaatgcgccgaaagcgctgctgactctcgataaacgcggcgtaccggtcaacaccattctggtgtccgccgtagtcaccgcgctgtgcgtgctgatcaactacctggcgccggaatcggcgttcggactgctgatggcgctggtggtctccgcgctggtaattaactgggcgatgattagcctcgcgcacatcaaattccgtcgcgctaagcagcaggaaggcgtgaaaacacgtttcccagcgctgttctacccgctgggtaactgggtatgcctgctatttatggtcgcggtactggccatcat
